United States Patent Application Publication US 2020/0248168 A1 - sequence listing, part 3

SEQ ID NO: 25098 - DNA, 20 bp, Artificial Sequence
  Description of Artificial Sequence: Synthetic oligonucleotide
  Target: PCSK9; (+) strand; PAM type: YTN; PAM sequence: CTG
ggccactgcatatacactgg

SEQ ID NO: 25099 - DNA, 20 bp, Artificial Sequence
  Description of Artificial Sequence: Synthetic oligonucleotide
  Target: PCSK9; (+) strand; PAM type: YTN; PAM sequence: CTG
catatacactggggactgtg

SEQ ID NO: 25100 - DNA, 20 bp, Artificial Sequence
  Description of Artificial Sequence: Synthetic oligonucleotide
  Target: PCSK9; (+) strand; PAM type: YTN; PAM sequence: CTG
gggactgtgcttagtaggcc

SEQ ID NO: 25101 - DNA, 20 bp, Artificial Sequence
  Description of Artificial Sequence: Synthetic oligonucleotide
  Target: PCSK9; (+) strand; PAM type: YTN; PAM sequence: CTG
tgcttagtaggcccattgct

SEQ ID NO: 25102 - DNA, 20 bp, Artificial Sequence
  Description of Artificial Sequence: Synthetic oligonucleotide
  Target: PCSK9; (+) strand; PAM type: YTN; PAM sequence: CTT
agtaggcccattgctgaaaa

SEQ ID NO: 25103 - DNA, 20 bp, Artificial Sequence
  Description of Artificial Sequence: Synthetic oligonucleotide
  Target: PCSK9; (+) strand; PAM type: YTN; PAM sequence: TTA
gtaggcccattgctgaaaat

SEQ ID NO: 25104 - DNA, 20 bp, Artificial Sequence
  Description of Artificial Sequence: Synthetic oligonucleotide
  Target: PCSK9; (+) strand; PAM type: YTN; PAM sequence: TTG
ctgaaaatcagaaggggaca

SEQ ID NO: 25105 - DNA, 20 bp, Artificial Sequence
  Description of Artificial Sequence: Synthetic oligonucleotide
  Target: PCSK9; (+) strand; PAM type: YTN; PAM sequence: CTG
aaaatcagaaggggacagca

SEQ ID NO: 25106 - DNA, 20 bp, Artificial Sequence
  Description of Artificial Sequence: Synthetic oligonucleotide
  Target: PCSK9; (+) strand; PAM type: YTN; PAM sequence: TTG
agcacttatcgggtaccaag

SEQ ID NO: 25107 - DNA, 20 bp, Artificial Sequence
  Description of Artificial Sequence: Synthetic oligonucleotide
  Target: PCSK9; (+) strand; PAM type: YTN; PAM sequence: CTT
atcgggtaccaagcacagta

SEQ ID NO: 25108 - DNA, 20 bp, Artificial Sequence
  Description of Artificial Sequence: Synthetic oligonucleotide
  Target: PCSK9; (+) strand; PAM type: YTN; PAM sequence: TTA
tcgggtaccaagcacagtaa

SEQ ID NO: 25109 - DNA, 20 bp, Artificial Sequence
  Description of Artificial Sequence: Synthetic oligonucleotide
  Target: PCSK9; (+) strand; PAM type: YTN; PAM sequence: CTA
ctggctttctgtatagaatt

SEQ ID NO: 25110 - DNA, 20 bp, Artificial Sequence
  Description of Artificial Sequence: Synthetic oligonucleotide
  Target: PCSK9; (+) strand; PAM type: YTN; PAM sequence: CTG
gctttctgtatagaattccc

SEQ ID NO: 25111 - DNA, 20 bp, Artificial Sequence
  Description of Artificial Sequence: Synthetic oligonucleotide
  Target: PCSK9; (+) strand; PAM type: YTN; PAM sequence: CTT
tctgtatagaattcccttta

SEQ ID NO: 25112 - DNA, 20 bp, Artificial Sequence
  Description of Artificial Sequence: Synthetic oligonucleotide
  Target: PCSK9; (+) strand; PAM type: YTN; PAM sequence: TTT
ctgtatagaattccctttaa

SEQ ID NO: 25113 - DNA, 20 bp, Artificial Sequence
  Description of Artificial Sequence: Synthetic oligonucleotide
  Target: PCSK9; (+) strand; PAM type: YTN; PAM sequence: TTC
tgtatagaattccctttaag

SEQ ID NO: 25114 - DNA, 20 bp, Artificial Sequence
  Description of Artificial Sequence: Synthetic oligonucleotide
  Target: PCSK9; (+) strand; PAM type: YTN; PAM sequence: CTG
tatagaattccctttaagcc

SEQ ID NO: 25115 - DNA, 20 bp, Artificial Sequence
  Description of Artificial Sequence: Synthetic oligonucleotide
  Target: PCSK9; (+) strand; PAM type: YTN; PAM sequence: TTC
cctttaagcctggccatgcc

SEQ ID NO: 25116 - DNA, 20 bp, Artificial Sequence
  Description of Artificial Sequence: Synthetic oligonucleotide
  Target: PCSK9; (+) strand; PAM type: YTN; PAM sequence: CTT
taagcctggccatgccccag

SEQ ID NO: 25117 - DNA, 20 bp, Artificial Sequence
  Description of Artificial Sequence: Synthetic oligonucleotide
  Target: PCSK9; (+) strand; PAM type: YTN; PAM sequence: TTT
aagcctggccatgccccagt

SEQ ID NO: 25118 - DNA, 20 bp, Artificial Sequence
  Description of Artificial Sequence: Synthetic oligonucleotide
  Target: PCSK9; (+) strand; PAM type: YTN; PAM sequence: TTA
agcctggccatgccccagtg

SEQ ID NO: 25119 - DNA, 20 bp, Artificial Sequence
  Description of Artificial Sequence: Synthetic oligonucleotide
  Target: PCSK9; (+) strand; PAM type: YTN; PAM sequence: CTG
gccatgccccagtggtacgt

SEQ ID NO: 25120 - DNA, 20 bp, Artificial Sequence
  Description of Artificial Sequence: Synthetic oligonucleotide
  Target: PCSK9; (+) strand; PAM type: YTN; PAM sequence: CTA
tcttcatttgaaagacgagg

SEQ ID NO: 25121 - DNA, 20 bp, Artificial Sequence
  Description of Artificial Sequence: Synthetic oligonucleotide
  Target: PCSK9; (+) strand; PAM type: YTN; PAM sequence: CTT
catttgaaagacgaggagac

SEQ ID NO: 25122 - DNA, 20 bp, Artificial Sequence
  Description of Artificial Sequence: Synthetic oligonucleotide
  Target: PCSK9; (+) strand; PAM type: YTN; PAM sequence: TTC
atttgaaagacgaggagact

SEQ ID NO: 25123 - DNA, 20 bp, Artificial Sequence
  Description of Artificial Sequence: Synthetic oligonucleotide
  Target: PCSK9; (+) strand; PAM type: YTN; PAM sequence: TTT
gaaagacgaggagactgaag

SEQ ID NO: 25124 - DNA, 20 bp, Artificial Sequence
  Description of Artificial Sequence: Synthetic oligonucleotide
  Target: PCSK9; (+) strand; PAM type: YTN; PAM sequence: TTG
aaagacgaggagactgaagt

SEQ ID NO: 25125 - DNA, 20 bp, Artificial Sequence
  Description of Artificial Sequence: Synthetic oligonucleotide
  Target: PCSK9; (+) strand; PAM type: YTN; PAM sequence: CTG
aagttcagaggggaccacac

SEQ ID NO: 25126 - DNA, 20 bp, Artificial Sequence
  Description of Artificial Sequence: Synthetic oligonucleotide
  Target: PCSK9; (+) strand; PAM type: YTN; PAM sequence: TTC
agaggggaccacacagacag

SEQ ID NO: 25127 - DNA, 20 bp, Artificial Sequence
  Description of Artificial Sequence: Synthetic oligonucleotide
  Target: PCSK9; (+) strand; PAM type: YTN; PAM sequence: CTA
ggggtagagcctggatcaaa

SEQ ID NO: 25128 - DNA, 20 bp, Artificial Sequence
  Description of Artificial Sequence: Synthetic oligonucleotide
  Target: PCSK9; (+) strand; PAM type: YTN; PAM sequence: CTG
gatcaaacccattggtctgc

SEQ ID NO: 25129 - DNA, 20 bp, Artificial Sequence
  Description of Artificial Sequence: Synthetic oligonucleotide
  Target: PCSK9; (+) strand; PAM type: YTN; PAM sequence: TTG
gtctgcctgccagccattct

SEQ ID NO: 25130 - DNA, 20 bp, Artificial Sequence
  Description of Artificial Sequence: Synthetic oligonucleotide
  Target: PCSK9; (+) strand; PAM type: YTN; PAM sequence: CTG
cctgccagccattcttgtgc

SEQ ID NO: 25131 - DNA, 20 bp, Artificial Sequence
  Description of Artificial Sequence: Synthetic oligonucleotide
  Target: PCSK9; (+) strand; PAM type: YTN; PAM sequence: CTG
ccagccattcttgtgccaat

SEQ ID NO: 25132 - DNA, 20 bp, Artificial Sequence
  Description of Artificial Sequence: Synthetic oligonucleotide
  Target: PCSK9; (+) strand; PAM type: YTN; PAM sequence: TTC
ttgtgccaatgcatctgctg

SEQ ID NO: 25133 - DNA, 20 bp, Artificial Sequence
  Description of Artificial Sequence: Synthetic oligonucleotide
  Target: PCSK9; (+) strand; PAM type: YTN; PAM sequence: CTT
gtgccaatgcatctgctgcc

SEQ ID NO: 25134 - DNA, 20 bp, Artificial Sequence
  Description of Artificial Sequence: Synthetic oligonucleotide
  Target: PCSK9; (+) strand; PAM type: YTN; PAM sequence: TTG
tgccaatgcatctgctgcct

SEQ ID NO: 25135 - DNA, 20 bp, Artificial Sequence
  Description of Artificial Sequence: Synthetic oligonucleotide
  Target: PCSK9; (+) strand; PAM type: YTN; PAM sequence: CTG
ctgcctacggaaacctgtag

SEQ ID NO: 25136 - DNA, 20 bp, Artificial Sequence
  Description of Artificial Sequence: Synthetic oligonucleotide
  Target: PCSK9; (+) strand; PAM type: YTN; PAM sequence: CTG
cctacggaaacctgtaggga

SEQ ID NO: 25137 - DNA, 20 bp, Artificial Sequence
  Description of Artificial Sequence: Synthetic oligonucleotide
  Target: PCSK9; (+) strand; PAM type: YTN; PAM sequence: CTA
cggaaacctgtagggacaag

SEQ ID NO: 25138 - DNA, 20 bp, Artificial Sequence
  Description of Artificial Sequence: Synthetic oligonucleotide
  Target: PCSK9; (+) strand; PAM type: YTN; PAM sequence: CTG
tagggacaaggccctgggat

SEQ ID NO: 25139 - DNA, 20 bp, Artificial Sequence
  Description of Artificial Sequence: Synthetic oligonucleotide
  Target: PCSK9; (+) strand; PAM type: YTN; PAM sequence: CTG
ggatgttcagtggagcctga

SEQ ID NO: 25140 - DNA, 20 bp, Artificial Sequence
  Description of Artificial Sequence: Synthetic oligonucleotide
  Target: PCSK9; (+) strand; PAM type: YTN; PAM sequence: TTC
agtggagcctgagtcatttt

SEQ ID NO: 25141 - DNA, 20 bp, Artificial Sequence
  Description of Artificial Sequence: Synthetic oligonucleotide
  Target: PCSK9; (+) strand; PAM type: YTN; PAM sequence: CTG
agtcattttataaaaaagca

SEQ ID NO: 25142 - DNA, 20 bp, Artificial Sequence
  Description of Artificial Sequence: Synthetic oligonucleotide
  Target: PCSK9; (+) strand; PAM type: YTN; PAM sequence: TTT
tataaaaaagcatgactcta

SEQ ID NO: 25143 - DNA, 20 bp, Artificial Sequence
  Description of Artificial Sequence: Synthetic oligonucleotide
  Target: PCSK9; (+) strand; PAM type: YTN; PAM sequence: TTT
ataaaaaagcatgactctag

SEQ ID NO: 25144 - DNA, 20 bp, Artificial Sequence
  Description of Artificial Sequence: Synthetic oligonucleotide
  Target: PCSK9; (+) strand; PAM type: YTN; PAM sequence: TTA
taaaaaagcatgactctagg

SEQ ID NO: 25145 - DNA, 20 bp, Artificial Sequence
  Description of Artificial Sequence: Synthetic oligonucleotide
  Target: PCSK9; (+) strand; PAM type: YTN; PAM sequence: CTC
tagggtccaaaattcctttg

SEQ ID NO: 25146 - DNA, 20 bp, Artificial Sequence
  Description of Artificial Sequence: Synthetic oligonucleotide
  Target: PCSK9; (+) strand; PAM type: YTN; PAM sequence: CTA
gggtccaaaattcctttgaa

SEQ ID NO: 25147 - DNA, 20 bp, Artificial Sequence
  Description of Artificial Sequence: Synthetic oligonucleotide
  Target: PCSK9; (+) strand; PAM type: YTN; PAM sequence: TTC
ctttgaagctgttgctatcc

SEQ ID NO: 25148 - DNA, 20 bp, Artificial Sequence
  Description of Artificial Sequence: Synthetic oligonucleotide
  Target: PCSK9; (+) strand; PAM type: YTN; PAM sequence: CTT
tgaagctgttgctatccaga

SEQ ID NO: 25149 - DNA, 20 bp, Artificial Sequence
  Description of Artificial Sequence: Synthetic oligonucleotide
  Target: PCSK9; (+) strand; PAM type: YTN; PAM sequence: TTT
gaagctgttgctatccagag

SEQ ID NO: 25150 - DNA, 20 bp, Artificial Sequence
  Description of Artificial Sequence: Synthetic oligonucleotide
  Target: PCSK9; (+) strand; PAM type: YTN; PAM sequence: TTG
aagctgttgctatccagagt

SEQ ID NO: 25151 - DNA, 20 bp, Artificial Sequence
  Description of Artificial Sequence: Synthetic oligonucleotide
  Target: PCSK9; (+) strand; PAM type: YTN; PAM sequence: CTG
ttgctatccagagtgaagtc

SEQ ID NO: 25152 - DNA, 20 bp, Artificial Sequence
  Description of Artificial Sequence: Synthetic oligonucleotide
  Target: PCSK9; (+) strand; PAM type: YTN; PAM sequence: TTG
ctatccagagtgaagtccct

SEQ ID NO: 25153 - DNA, 20 bp, Artificial Sequence
  Description of Artificial Sequence: Synthetic oligonucleotide
  Target: PCSK9; (+) strand; PAM type: YTN; PAM sequence: CTA
tccagagtgaagtcccttct

SEQ ID NO: 25154 - DNA, 20 bp, Artificial Sequence
  Description of Artificial Sequence: Synthetic oligonucleotide
  Target: PCSK9; (+) strand; PAM type: YTN; PAM sequence: CTT
ctttaggacagggtggccct

SEQ ID NO: 25155 - DNA, 20 bp, Artificial Sequence
  Description of Artificial Sequence: Synthetic oligonucleotide
  Target: PCSK9; (+) strand; PAM type: YTN; PAM sequence: TTC
tttaggacagggtggccctc

SEQ ID NO: 25156 - DNA, 20 bp, Artificial Sequence
  Description of Artificial Sequence: Synthetic oligonucleotide
  Target: PCSK9; (+) strand; PAM type: YTN; PAM sequence: CTT
taggacagggtggccctcct

SEQ ID NO: 25157 - DNA, 20 bp, Artificial Sequence
  Description of Artificial Sequence: Synthetic oligonucleotide
  Target: PCSK9; (+) strand; PAM type: YTN; PAM sequence: TTT
aggacagggtggccctcctc

SEQ ID NO: 25158 - DNA, 20 bp, Artificial Sequence
  Description of Artificial Sequence: Synthetic oligonucleotide
  Target: PCSK9; (+) strand; PAM type: YTN; PAM sequence: TTA
ggacagggtggccctcctcc

SEQ ID NO: 25159 - DNA, 20 bp, Artificial Sequence
  Description of Artificial Sequence: Synthetic oligonucleotide
  Target: PCSK9; (+) strand; PAM type: YTN; PAM sequence: CTC
ctccctcctggatgtcacat

SEQ ID NO: 25160 - DNA, 20 bp, Artificial Sequence
  Description of Artificial Sequence: Synthetic oligonucleotide
  Target: PCSK9; (+) strand; PAM type: YTN; PAM sequence: CTC
cctcctggatgtcacatctt

SEQ ID NO: 25161 - DNA, 20 bp, Artificial Sequence
  Description of Artificial Sequence: Synthetic oligonucleotide
  Target: PCSK9; (+) strand; PAM type: YTN; PAM sequence: CTC
ctggatgtcacatcttcggt

SEQ ID NO: 25162 - DNA, 20 bp, Artificial Sequence
  Description of Artificial Sequence: Synthetic oligonucleotide
  Target: PCSK9; (+) strand; PAM type: YTN; PAM sequence: CTG
gatgtcacatcttcggtgga

SEQ ID NO: 25163 - DNA, 20 bp, Artificial Sequence
  Description of Artificial Sequence: Synthetic oligonucleotide
  Target: PCSK9; (+) strand; PAM type: YTN; PAM sequence: CTT
cggtggaggggcagaaaggg

SEQ ID NO: 25164 - DNA, 20 bp, Artificial Sequence
  Description of Artificial Sequence: Synthetic oligonucleotide
  Target: PCSK9; (+) strand; PAM type: YTN; PAM sequence: TTC
ggtggaggggcagaaagggg

SEQ ID NO: 25165 - DNA, 20 bp, Artificial Sequence
  Description of Artificial Sequence: Synthetic oligonucleotide
  Target: PCSK9; (+) strand; PAM type: YTN; PAM sequence: CTG
ggtattctcctcaccctggc

SEQ ID NO: 25166 - DNA, 20 bp, Artificial Sequence
  Description of Artificial Sequence: Synthetic oligonucleotide
  Target: PCSK9; (+) strand; PAM type: YTN; PAM sequence: TTC
tcctcaccctggccctagtg

SEQ ID NO: 25167 - DNA, 20 bp, Artificial Sequence
  Description of Artificial Sequence: Synthetic oligonucleotide
  Target: PCSK9; (+) strand; PAM type: YTN; PAM sequence: CTC
ctcaccctggccctagtgct

SEQ ID NO: 25168 - DNA, 20 bp, Artificial Sequence
  Description of Artificial Sequence: Synthetic oligonucleotide
  Target: PCSK9; (+) strand; PAM type: YTN; PAM sequence: CTC
accctggccctagtgcttca

SEQ ID NO: 25169 - DNA, 20 bp, Artificial Sequence
  Description of Artificial Sequence: Synthetic oligonucleotide
  Target: PCSK9; (+) strand; PAM type: YTN; PAM sequence: CTG
gccctagtgcttcaaatctt

SEQ ID NO: 25170 - DNA, 20 bp, Artificial Sequence
  Description of Artificial Sequence: Synthetic oligonucleotide
  Target: PCSK9; (+) strand; PAM type: YTN; PAM sequence: CTA
gtgcttcaaatcttaaaaaa

SEQ ID NO: 25171 - DNA, 20 bp, Artificial Sequence
  Description of Artificial Sequence: Synthetic oligonucleotide
  Target: PCSK9; (+) strand; PAM type: YTN; PAM sequence: CTT
caaatcttaaaaaaacgttt

SEQ ID NO: 25172 - DNA, 20 bp, Artificial Sequence
  Description of Artificial Sequence: Synthetic oligonucleotide
  Target: PCSK9; (+) strand; PAM type: YTN; PAM sequence: TTC
aaatcttaaaaaaacgtttt

SEQ ID NO: 25173 - DNA, 20 bp, Artificial Sequence
  Description of Artificial Sequence: Synthetic oligonucleotide
  Target: PCSK9; (+) strand; PAM type: YTN; PAM sequence: CTT
aaaaaaacgtttttatttgt

SEQ ID NO: 25174 - DNA, 20 bp, Artificial Sequence
  Description of Artificial Sequence: Synthetic oligonucleotide
  Target: PCSK9; (+) strand; PAM type: YTN; PAM sequence: TTA
aaaaaacgtttttatttgtg

SEQ ID NO: 25175 - DNA, 20 bp, Artificial Sequence
  Description of Artificial Sequence: Synthetic oligonucleotide
  Target: PCSK9; (+) strand; PAM type: YTN; PAM sequence: TTT
ttatttgtgcttctgcacca

SEQ ID NO: 25176 - DNA, 20 bp, Artificial Sequence
  Description of Artificial Sequence: Synthetic oligonucleotide
  Target: PCSK9; (+) strand; PAM type: YTN; PAM sequence: TTT
tatttgtgcttctgcaccac

SEQ ID NO: 25177 - DNA, 20 bp, Artificial Sequence
  Description of Artificial Sequence: Synthetic oligonucleotide
  Target: PCSK9; (+) strand; PAM type: YTN; PAM sequence: TTT
atttgtgcttctgcaccacc

SEQ ID NO: 25178 - DNA, 20 bp, Artificial Sequence
  Description of Artificial Sequence: Synthetic oligonucleotide
  Target: PCSK9; (+) strand; PAM type: YTN; PAM sequence: TTA
tttgtgcttctgcaccacct

SEQ ID NO: 25179 - DNA, 20 bp, Artificial Sequence
  Description of Artificial Sequence: Synthetic oligonucleotide
  Target: PCSK9; (+) strand; PAM type: YTN; PAM sequence: TTT
gtgcttctgcaccaccttct

SEQ ID NO: 25180 - DNA, 20 bp, Artificial Sequence
  Description of Artificial Sequence: Synthetic oligonucleotide
  Target: PCSK9; (+) strand; PAM type: YTN; PAM sequence: TTG
tgcttctgcaccaccttcta

SEQ ID NO: 25181 - DNA, 20 bp, Artificial Sequence
  Description of Artificial Sequence: Synthetic oligonucleotide
  Target: PCSK9; (+) strand; PAM type: YTN; PAM sequence: CTT
ctgcaccaccttctagccca

SEQ ID NO: 25182 - DNA, 20 bp, Artificial Sequence
  Description of Artificial Sequence: Synthetic oligonucleotide
  Target: PCSK9; (+) strand; PAM type: YTN; PAM sequence: TTC
tgcaccaccttctagcccac

SEQ ID NO: 25183 - DNA, 20 bp, Artificial Sequence
  Description of Artificial Sequence: Synthetic oligonucleotide
  Target: PCSK9; (+) strand; PAM type: YTN; PAM sequence: CTG
caccaccttctagcccacct

SEQ ID NO: 25184 - DNA, 20 bp, Artificial Sequence
  Description of Artificial Sequence: Synthetic oligonucleotide
  Target: PCSK9; (+) strand; PAM type: YTN; PAM sequence: CTT
ctagcccacctcgtttcctg

SEQ ID NO: 25185 - DNA, 20 bp, Artificial Sequence
  Description of Artificial Sequence: Synthetic oligonucleotide
  Target: PCSK9; (+) strand; PAM type: YTN; PAM sequence: TTC
tagcccacctcgtttcctgg

SEQ ID NO: 25186 - DNA, 20 bp, Artificial Sequence
  Description of Artificial Sequence: Synthetic oligonucleotide
  Target: PCSK9; (+) strand; PAM type: YTN; PAM sequence: CTA
gcccacctcgtttcctggcc

SEQ ID NO: 25187 - DNA, 20 bp, Artificial Sequence
  Description of Artificial Sequence: Synthetic oligonucleotide
  Target: PCSK9; (+) strand; PAM type: YTN; PAM sequence: CTC
gtttcctggcctctaacttg

SEQ ID NO: 25188 - DNA, 20 bp, Artificial Sequence
  Description of Artificial Sequence: Synthetic oligonucleotide
  Target: PCSK9; (+) strand; PAM type: YTN; PAM sequence: TTT
cctggcctctaacttgatga

SEQ ID NO: 25189 - DNA, 20 bp, Artificial Sequence
  Description of Artificial Sequence: Synthetic oligonucleotide
  Target: PCSK9; (+) strand; PAM type: YTN; PAM sequence: TTC
ctggcctctaacttgatgag

SEQ ID NO: 25190 - DNA, 20 bp, Artificial Sequence
  Description of Artificial Sequence: Synthetic oligonucleotide
  Target: PCSK9; (+) strand; PAM type: YTN; PAM sequence: CTG
gcctctaacttgatgagagc

SEQ ID NO: 25191 - DNA, 20 bp, Artificial Sequence
  Description of Artificial Sequence: Synthetic oligonucleotide
  Target: PCSK9; (+) strand; PAM type: YTN; PAM sequence: CTC
taacttgatgagagcgtgtg

SEQ ID NO: 25192 - DNA, 20 bp, Artificial Sequence
  Description of Artificial Sequence: Synthetic oligonucleotide
  Target: PCSK9; (+) strand; PAM type: YTN; PAM sequence: CTA
acttgatgagagcgtgtgtc

SEQ ID NO: 25193 - DNA, 20 bp, Artificial Sequence
  Description of Artificial Sequence: Synthetic oligonucleotide
  Target: PCSK9; (+) strand; PAM type: YTN; PAM sequence: CTT
gatgagagcgtgtgtcattt

SEQ ID NO: 25194 - DNA, 20 bp, Artificial Sequence
  Description of Artificial Sequence: Synthetic oligonucleotide
  Target: PCSK9; (+) strand; PAM type: YTN; PAM sequence: TTG
atgagagcgtgtgtcatttt

SEQ ID NO: 25195 - DNA, 20 bp, Artificial Sequence
  Description of Artificial Sequence: Synthetic oligonucleotide
  Target: PCSK9; (+) strand; PAM type: YTN; PAM sequence: TTT
tcacactgattctccacatg

SEQ ID NO: 25196 - DNA, 20 bp, Artificial Sequence
  Description of Artificial Sequence: Synthetic oligonucleotide
  Target: PCSK9; (+) strand; PAM type: YTN; PAM sequence: TTT
cacactgattctccacatgg

SEQ ID NO: 25197 - DNA, 20 bp, Artificial Sequence
  Description of Artificial Sequence: Synthetic oligonucleotide
  Target: PCSK9; (+) strand; PAM type: YTN; PAM sequence: TTC
acactgattctccacatggc

SEQ ID NO: 25198 - DNA, 20 bp, Artificial Sequence
  Description of Artificial Sequence: Synthetic oligonucleotide
  Target: PCSK9; (+) strand; PAM type: YTN; PAM sequence: CTG
attctccacatggcaggcgg

SEQ ID NO: 25199 - DNA, 20 bp, Artificial Sequence
  Description of Artificial Sequence: Synthetic oligonucleotide
  Target: PCSK9; (+) strand; PAM type: YTN; PAM sequence: TTC
tccacatggcaggcggtgct

SEQ ID NO: 25200 - DNA, 20 bp, Artificial Sequence
  Description of Artificial Sequence: Synthetic oligonucleotide
  Target: PCSK9; (+) strand; PAM type: YTN; PAM sequence: CTC
cacatggcaggcggtgcttc

SEQ ID NO: 25201 - DNA, 20 bp, Artificial Sequence
  Description of Artificial Sequence: Synthetic oligonucleotide
  Target: PCSK9; (+) strand; PAM type: YTN; PAM sequence: CTT
cttagcctcctgcagacagt

SEQ ID NO: 25202 - DNA, 20 bp, Artificial Sequence
  Description of Artificial Sequence: Synthetic oligonucleotide
  Target: PCSK9; (+) strand; PAM type: YTN; PAM sequence: TTC
ttagcctcctgcagacagtg

SEQ ID NO: 25203 - DNA, 20 bp, Artificial Sequence
  Description of Artificial Sequence: Synthetic oligonucleotide
  Target: PCSK9; (+) strand; PAM type: YTN; PAM sequence: CTT
agcctcctgcagacagtgag

SEQ ID NO: 25204 - DNA, 20 bp, Artificial Sequence
  Description of Artificial Sequence: Synthetic oligonucleotide
  Target: PCSK9; (+) strand; PAM type: YTN; PAM sequence: TTA
gcctcctgcagacagtgagg

SEQ ID NO: 25205 - DNA, 20 bp, Artificial Sequence
  Description of Artificial Sequence: Synthetic oligonucleotide
  Target: PCSK9; (+) strand; PAM type: YTN; PAM sequence: CTC
ctgcagacagtgaggcccca

SEQ ID NO: 25206 - DNA, 20 bp, Artificial Sequence
  Description of Artificial Sequence: Synthetic oligonucleotide
  Target: PCSK9; (+) strand; PAM type: YTN; PAM sequence: CTG
cagacagtgaggccccacgg

SEQ ID NO: 25207 - DNA, 20 bp, Artificial Sequence
  Description of Artificial Sequence: Synthetic oligonucleotide
  Target: PCSK9; (+) strand; PAM type: YTN; PAM sequence: CTT
gtccaaggtcacacagcgtg

SEQ ID NO: 25208 - DNA, 20 bp, Artificial Sequence
  Description of Artificial Sequence: Synthetic oligonucleotide
  Target: PCSK9; (+) strand; PAM type: YTN; PAM sequence: TTG
tccaaggtcacacagcgtgt

SEQ ID NO: 25209 - DNA, 20 bp, Artificial Sequence
  Description of Artificial Sequence: Synthetic oligonucleotide
  Target: PCSK9; (+) strand; PAM type: YTN; PAM sequence: CTG
gagtctggacctgggtctcc

SEQ ID NO: 25210 - DNA, 20 bp, Artificial Sequence
  Description of Artificial Sequence: Synthetic oligonucleotide
  Target: PCSK9; (+) strand; PAM type: YTN; PAM sequence: CTG
gacctgggtctcctagctgc

SEQ ID NO: 25211 - DNA, 20 bp, Artificial Sequence
  Description of Artificial Sequence: Synthetic oligonucleotide
  Target: PCSK9; (+) strand; PAM type: YTN; PAM sequence: CTG
ggtctcctagctgcactgca

SEQ ID NO: 25212 - DNA, 20 bp, Artificial Sequence
  Description of Artificial Sequence: Synthetic oligonucleotide
  Target: PCSK9; (+) strand; PAM type: YTN; PAM sequence: CTC
ctagctgcactgcactgctg

SEQ ID NO: 25213 - DNA, 20 bp, Artificial Sequence
  Description of Artificial Sequence: Synthetic oligonucleotide
  Target: PCSK9; (+) strand; PAM type: YTN; PAM sequence: CTA
gctgcactgcactgctgccc

SEQ ID NO: 25214 - DNA, 20 bp, Artificial Sequence
  Description of Artificial Sequence: Synthetic oligonucleotide
  Target: PCSK9; (+) strand; PAM type: YTN; PAM sequence: CTG
cactgcactgctgccccatg

SEQ ID NO: 25215 - DNA, 20 bp, Artificial Sequence
  Description of Artificial Sequence: Synthetic oligonucleotide
  Target: PCSK9; (+) strand; PAM type: YTN; PAM sequence: CTG
cactgctgccccatgggtta

SEQ ID NO: 25216 - DNA, 20 bp, Artificial Sequence
  Description of Artificial Sequence: Synthetic oligonucleotide
  Target: PCSK9; (+) strand; PAM type: YTN; PAM sequence: CTG
ctgccccatgggttaatcag

SEQ ID NO: 25217 - DNA, 20 bp, Artificial Sequence
  Description of Artificial Sequence: Synthetic oligonucleotide
  Target: PCSK9; (+) strand; PAM type: YTN; PAM sequence: CTG
ccccatgggttaatcagctc

SEQ ID NO: 25218 - DNA, 20 bp, Artificial Sequence
  Description of Artificial Sequence: Synthetic oligonucleotide
  Target: PCSK9; (+) strand; PAM type: YTN; PAM sequence: TTA
atcagctcagcataccgtgg

SEQ ID NO: 25219 - DNA, 20 bp, Artificial Sequence
  Description of Artificial Sequence: Synthetic oligonucleotide
  Target: PCSK9; (+) strand; PAM type: YTN; PAM sequence: CTC
agcataccgtggctgaacag

SEQ ID NO: 25220 - DNA, 20 bp, Artificial Sequence
  Description of Artificial Sequence: Synthetic oligonucleotide
  Target: PCSK9; (+) strand; PAM type: YTN; PAM sequence: CTG
aacagctacctcataccaag

SEQ ID NO: 25221 - DNA, 20 bp, Artificial Sequence
  Description of Artificial Sequence: Synthetic oligonucleotide
  Target: PCSK9; (+) strand; PAM type: YTN; PAM sequence: CTA
cctcataccaaggcctgtgg

SEQ ID NO: 25222 - DNA, 20 bp, Artificial Sequence
  Description of Artificial Sequence: Synthetic oligonucleotide
  Target: PCSK9; (+) strand; PAM type: YTN; PAM sequence: CTC
ataccaaggcctgtggcgcc

SEQ ID NO: 25223 - DNA, 20 bp, Artificial Sequence
  Description of Artificial Sequence: Synthetic oligonucleotide
  Target: PCSK9; (+) strand; PAM type: YTN; PAM sequence: CTG
tggcgccatgacagggattg

SEQ ID NO: 25224 - DNA, 20 bp, Artificial Sequence
  Description of Artificial Sequence: Synthetic oligonucleotide
  Target: PCSK9; (+) strand; PAM type: YTN; PAM sequence: TTG
acagggtccctgccttggaa

SEQ ID NO: 25225 - DNA, 20 bp, Artificial Sequence
  Description of Artificial Sequence: Synthetic oligonucleotide
  Target: PCSK9; (+) strand; PAM type: YTN; PAM sequence: CTG
ccttggaaacccgtagtcta

SEQ ID NO: 25226 - DNA, 20 bp, Artificial Sequence
  Description of Artificial Sequence: Synthetic oligonucleotide
  Target: PCSK9; (+) strand; PAM type: YTN; PAM sequence: CTT
ggaaacccgtagtctaagta

SEQ ID NO: 25227 - DNA, 20 bp, Artificial Sequence
  Description of Artificial Sequence: Synthetic oligonucleotide
  Target: PCSK9; (+) strand; PAM type: YTN; PAM sequence: TTG
gaaacccgtagtctaagtag

SEQ ID NO: 25228 - DNA, 20 bp, Artificial Sequence
  Description of Artificial Sequence: Synthetic oligonucleotide
  Target: PCSK9; (+) strand; PAM type: YTN; PAM sequence: CTA
agtagaggagactgacaagt

SEQ ID NO: 25229 - DNA, 20 bp, Artificial Sequence
  Description of Artificial Sequence: Synthetic oligonucleotide
  Target: PCSK9; (+) strand; PAM type: YTN; PAM sequence: CTG
acaagtcaatgccttccatc

SEQ ID NO: 25230 - DNA, 20 bp, Artificial Sequence
  Description of Artificial Sequence: Synthetic oligonucleotide
  Target: PCSK9; (+) strand; PAM type: YTN; PAM sequence: CTT
ccatcagtctgctcaacaca

SEQ ID NO: 25231 - DNA, 20 bp, Artificial Sequence
  Description of Artificial Sequence: Synthetic oligonucleotide
  Target: PCSK9; (+) strand; PAM type: YTN; PAM sequence: TTC
catcagtctgctcaacacac

SEQ ID NO: 25232 - DNA, 20 bp, Artificial Sequence
  Description of Artificial Sequence: Synthetic oligonucleotide
  Target: PCSK9; (+) strand; PAM type: YTN; PAM sequence: CTG
ctcaacacacgtttaccaag

SEQ ID NO: 25233 - DNA, 20 bp, Artificial Sequence
  Description of Artificial Sequence: Synthetic oligonucleotide
  Target: PCSK9; (+) strand; PAM type: YTN; PAM sequence: CTC
aacacacgtttaccaagtgc

SEQ ID NO: 25234 - DNA, 20 bp, Artificial Sequence
  Description of Artificial Sequence: Synthetic oligonucleotide
  Target: PCSK9; (+) strand; PAM type: YTN; PAM sequence: TTT
accaagtgcctactgtgtgc

SEQ ID NO: 25235 - DNA, 20 bp, Artificial Sequence
  Description of Artificial Sequence: Synthetic oligonucleotide
  Target: PCSK9; (+) strand; PAM type: YTN; PAM sequence: TTA
ccaagtgcctactgtgtgct

SEQ ID NO: 25236 - DNA, 20 bp, Artificial Sequence
  Description of Artificial Sequence: Synthetic oligonucleotide
  Target: PCSK9; (+) strand; PAM type: YTN; PAM sequence: CTA
ctgtgtgctgcagaggcgaa

SEQ ID NO: 25237 - DNA, 20 bp, Artificial Sequence
  Description of Artificial Sequence: Synthetic oligonucleotide
  Target: PCSK9; (+) strand; PAM type: YTN; PAM sequence: CTG
tgtgctgcagaggcgaagat

SEQ ID NO: 25238 - DNA, 20 bp, Artificial Sequence
  Description of Artificial Sequence: Synthetic oligonucleotide
  Target: PCSK9; (+) strand; PAM type: YTN; PAM sequence: CTG
cagaggcgaagatgacacag

SEQ ID NO: 25239 - DNA, 20 bp, Artificial Sequence
  Description of Artificial Sequence: Synthetic oligonucleotide
  Target: PCSK9; (+) strand; PAM type: YTN; PAM sequence: CTC
aggcctttcccttgagctta

SEQ ID NO: 25240 - DNA, 20 bp, Artificial Sequence
  Description of Artificial Sequence: Synthetic oligonucleotide
  Target: PCSK9; (+) strand; PAM type: YTN; PAM sequence: CTT
tcccttgagcttacagttca

SEQ ID NO: 25241 - DNA, 20 bp, Artificial Sequence
  Description of Artificial Sequence: Synthetic oligonucleotide
  Target: PCSK9; (+) strand; PAM type: YTN; PAM sequence: TTT
cccttgagcttacagttcag

SEQ ID NO: 25242 - DNA, 20 bp, Artificial Sequence
  Description of Artificial Sequence: Synthetic oligonucleotide
  Target: PCSK9; (+) strand; PAM type: YTN; PAM sequence: TTC
ccttgagcttacagttcagg

SEQ ID NO: 25243 - DNA, 20 bp, Artificial Sequence
  Description of Artificial Sequence: Synthetic oligonucleotide
  Target: PCSK9; (+) strand; PAM type: YTN; PAM sequence: CTT
gagcttacagttcaggagga

SEQ ID NO: 25244 - DNA, 20 bp, Artificial Sequence
  Description of Artificial Sequence: Synthetic oligonucleotide
  Target: PCSK9; (+) strand; PAM type: YTN; PAM sequence: TTG
agcttacagttcaggaggag

SEQ ID NO: 25245 - DNA, 20 bp, Artificial Sequence
  Description of Artificial Sequence: Synthetic oligonucleotide
  Target: PCSK9; (+) strand; PAM type: YTN; PAM sequence: CTT
acagttcaggaggagagact

SEQ ID NO: 25246 - DNA, 20 bp, Artificial Sequence
  Description of Artificial Sequence: Synthetic oligonucleotide
  Target: PCSK9; (+) strand; PAM type: YTN; PAM sequence: TTA
cagttcaggaggagagactg

SEQ ID NO: 25247 - DNA, 20 bp, Artificial Sequence
  Description of Artificial Sequence: Synthetic oligonucleotide
  Target: PCSK9; (+) strand; PAM type: YTN; PAM sequence: TTC
aggaggagagactgaccagt

SEQ ID NO: 25248 - DNA, 20 bp, Artificial Sequence
  Description of Artificial Sequence: Synthetic oligonucleotide
  Target: PCSK9; (+) strand; PAM type: YTN; PAM sequence: CTG
accagtgactgccagtacag

SEQ ID NO: 25249 - DNA, 20 bp, Artificial Sequence
  Description of Artificial Sequence: Synthetic oligonucleotide
  Target: PCSK9; (+) strand; PAM type: YTN; PAM sequence: CTG
ccagtacagttgactatggg

SEQ ID NO: 25250 - DNA, 20 bp, Artificial Sequence
  Description of Artificial Sequence: Synthetic oligonucleotide
  Target: PCSK9; (+) strand; PAM type: YTN; PAM sequence: TTG
actatgggacaatgtgctca

SEQ ID NO: 25251 - DNA, 20 bp, Artificial Sequence
  Description of Artificial Sequence: Synthetic oligonucleotide
  Target: PCSK9; (+) strand; PAM type: YTN; PAM sequence: CTA
tgggacaatgtgctcagcct

SEQ ID NO: 25252 - DNA, 20 bp, Artificial Sequence
  Description of Artificial Sequence: Synthetic oligonucleotide
  Target: PCSK9; (+) strand; PAM type: YTN; PAM sequence: CTC
agccttggggagagacgaag

SEQ ID NO: 25253 - DNA, 20 bp, Artificial Sequence
  Description of Artificial Sequence: Synthetic oligonucleotide
  Target: PCSK9; (+) strand; PAM type: YTN; PAM sequence: CTT
ggggagagacgaagaaggta

SEQ ID NO: 25254 - DNA, 20 bp, Artificial Sequence
  Description of Artificial Sequence: Synthetic oligonucleotide
  Target: PCSK9; (+) strand; PAM type: YTN; PAM sequence: TTG
gggagagacgaagaaggtac

SEQ ID NO: 25255 - DNA, 20 bp, Artificial Sequence
  Description of Artificial Sequence: Synthetic oligonucleotide
  Target: PCSK9; (+) strand; PAM type: YTN; PAM sequence: CTG
ctcagaggagagtaggccaa

SEQ ID NO: 25256 - DNA, 20 bp, Artificial Sequence
  Description of Artificial Sequence: Synthetic oligonucleotide
  Target: PCSK9; (+) strand; PAM type: YTN; PAM sequence: CTC
agaggagagtaggccaagca

SEQ ID NO: 25257 - DNA, 20 bp, Artificial Sequence
  Description of Artificial Sequence: Synthetic oligonucleotide
  Target: PCSK9; (+) strand; PAM type: YTN; PAM sequence: CTG
caggcatttgccatcgagag

SEQ ID NO: 25258 - DNA, 20 bp, Artificial Sequence
  Description of Artificial Sequence: Synthetic oligonucleotide
  Target: PCSK9; (+) strand; PAM type: YTN; PAM sequence: TTT
gccatcgagagctggacttc

SEQ ID NO: 25259 - DNA, 20 bp, Artificial Sequence
  Description of Artificial Sequence: Synthetic oligonucleotide
  Target: PCSK9; (+) strand; PAM type: YTN; PAM sequence: TTG
ccatcgagagctggacttca

SEQ ID NO: 25260 - DNA, 20 bp, Artificial Sequence
  Description of Artificial Sequence: Synthetic oligonucleotide
  Target: PCSK9; (+) strand; PAM type: YTN; PAM sequence: CTG
gacttcaaactgggcatcat

SEQ ID NO: 25261 - DNA, 20 bp, Artificial Sequence
  Description of Artificial Sequence: Synthetic oligonucleotide
  Target: PCSK9; (+) strand; PAM type: YTN; PAM sequence: CTT
caaactgggcatcataccag

SEQ ID NO: 25262 - DNA, 20 bp, Artificial Sequence
  Description of Artificial Sequence: Synthetic oligonucleotide
  Target: PCSK9; (+) strand; PAM type: YTN; PAM sequence: TTC
aaactgggcatcataccagc

SEQ ID NO: 25263 - DNA, 20 bp, Artificial Sequence
  Description of Artificial Sequence: Synthetic oligonucleotide
  Target: PCSK9; (+) strand; PAM type: YTN; PAM sequence: CTG
ggcatcataccagcctgggt

SEQ ID NO: 25264 - DNA, 20 bp, Artificial Sequence
  Description of Artificial Sequence: Synthetic oligonucleotide
  Target: PCSK9; (+) strand; PAM type: YTN; PAM sequence: CTG
ggttcgagtcctgcccagcc

SEQ ID NO: 25265 - DNA, 20 bp, Artificial Sequence
  Description of Artificial Sequence: Synthetic oligonucleotide
  Target: PCSK9; (+) strand; PAM type: YTN; PAM sequence: TTC
gagtcctgcccagcccctta

SEQ ID NO: 25266 - DNA, 20 bp, Artificial Sequence
  Description of Artificial Sequence: Synthetic oligonucleotide
  Target: PCSK9; (+) strand; PAM type: YTN; PAM sequence: CTG
cccagccccttattggctgt

SEQ ID NO: 25267 - DNA, 20 bp, Artificial Sequence
  Description of Artificial Sequence: Synthetic oligonucleotide
  Target: PCSK9; (+) strand; PAM type: YTN; PAM sequence: CTT
attggctgtctaaccctgag

SEQ ID NO: 25268 - DNA, 20 bp, Artificial Sequence
  Description of Artificial Sequence: Synthetic oligonucleotide
  Target: PCSK9; (+) strand; PAM type: YTN; PAM sequence: TTA
ttggctgtctaaccctgagc

SEQ ID NO: 25269 - DNA, 20 bp, Artificial Sequence
  Description of Artificial Sequence: Synthetic oligonucleotide
  Target: PCSK9; (+) strand; PAM type: YTN; PAM sequence: TTG
gctgtctaaccctgagcaaa

SEQ ID NO: 25270 - DNA, 20 bp, Artificial Sequence
  Description of Artificial Sequence: Synthetic oligonucleotide
  Target: PCSK9; (+) strand; PAM type: YTN; PAM sequence: CTG
tctaaccctgagcaaatccc

SEQ ID NO: 25271 - DNA, 20 bp, Artificial Sequence
  Description of Artificial Sequence: Synthetic oligonucleotide
  Target: PCSK9; (+) strand; PAM type: YTN; PAM sequence: CTA
accctgagcaaatcccttca

SEQ ID NO: 25272 - DNA, 20 bp, Artificial Sequence
  Description of Artificial Sequence: Synthetic oligonucleotide
  Target: PCSK9; (+) strand; PAM type: YTN; PAM sequence: CTG
agcaaatcccttcacctctc

SEQ ID NO: 25273 - DNA, 20 bp, Artificial Sequence
  Description of Artificial Sequence: Synthetic oligonucleotide
  Target: PCSK9; (+) strand; PAM type: YTN; PAM sequence: CTT
cacctctctgagcctcattc

SEQ ID NO: 25274 - DNA, 20 bp, Artificial Sequence
  Description of Artificial Sequence: Synthetic oligonucleotide
  Target: PCSK9; (+) strand; PAM type: YTN; PAM sequence: TTC
acctctctgagcctcattcc

SEQ ID NO: 25275 - DNA, 20 bp, Artificial Sequence
  Description of Artificial Sequence: Synthetic oligonucleotide
  Target: PCSK9; (+) strand; PAM type: YTN; PAM sequence: CTC
tctgagcctcattcctctat

SEQ ID NO: 25276 - DNA, 20 bp, Artificial Sequence
  Description of Artificial Sequence: Synthetic oligonucleotide
  Target: PCSK9; (+) strand; PAM type: YTN; PAM sequence: CTC
tgagcctcattcctctatct

SEQ ID NO: 25277 - DNA, 20 bp, Artificial Sequence
  Description of Artificial Sequence: Synthetic oligonucleotide
  Target: PCSK9; (+) strand; PAM type: YTN; PAM sequence: CTG
agcctcattcctctatctgt

SEQ ID NO: 25278 - DNA, 20 bp, Artificial Sequence
  Description of Artificial Sequence: Synthetic oligonucleotide
  Target: PCSK9; (+) strand; PAM type: YTN; PAM sequence: CTC
attcctctatctgtaaacca

SEQ ID NO: 25279 - DNA, 20 bp, Artificial Sequence
  Description of Artificial Sequence: Synthetic oligonucleotide
  Target: PCSK9; (+) strand; PAM type: YTN; PAM sequence: TTC
ctctatctgtaaaccagtta

SEQ ID NO: 25280 - DNA, 20 bp, Artificial Sequence
  Description of Artificial Sequence: Synthetic oligonucleotide
  Target: PCSK9; (+) strand; PAM type: YTN; PAM sequence: CTC
tatctgtaaaccagttataa

SEQ ID NO: 25281 - DNA, 20 bp, Artificial Sequence
  Description of Artificial Sequence: Synthetic oligonucleotide
  Target: PCSK9; (+) strand; PAM type: YTN; PAM sequence: CTA
tctgtaaaccagttataata

SEQ ID NO: 25282 - DNA, 20 bp, Artificial Sequence
  Description of Artificial Sequence: Synthetic oligonucleotide
  Target: PCSK9; (+) strand; PAM type: YTN; PAM sequence: CTG
taaaccagttataataattg

SEQ ID NO: 25283 - DNA, 20 bp, Artificial Sequence
  Description of Artificial Sequence: Synthetic oligonucleotide
  Target: PCSK9; (+) strand; PAM type: YTN; PAM sequence: TTA
taataattggaacattcatt

SEQ ID NO: 25284 - DNA, 20 bp, Artificial Sequence
  Description of Artificial Sequence: Synthetic oligonucleotide
  Target: PCSK9; (+) strand; PAM type: YTN; PAM sequence: TTG
gaacattcatttaaggacta

SEQ ID NO: 25285 - DNA, 20 bp, Artificial Sequence
  Description of Artificial Sequence: Synthetic oligonucleotide
  Target: PCSK9; (+) strand; PAM type: YTN; PAM sequence: TTC
atttaaggactaaatgaggt

SEQ ID NO: 25286 - DNA, 20 bp, Artificial Sequence
  Description of Artificial Sequence: Synthetic oligonucleotide
  Target: PCSK9; (+) strand; PAM type: YTN; PAM sequence: TTT
aaggactaaatgaggtcgtg

SEQ ID NO: 25287 - DNA, 20 bp, Artificial Sequence
  Description of Artificial Sequence: Synthetic oligonucleotide
  Target: PCSK9; (+) strand; PAM type: YTN; PAM sequence: TTA
aggactaaatgaggtcgtga

SEQ ID NO: 25288 - DNA, 20 bp, Artificial Sequence
  Description of Artificial Sequence: Synthetic oligonucleotide
  Target: PCSK9; (+) strand; PAM type: YTN; PAM sequence: CTA
aatgaggtcgtgaagcattc

SEQ ID NO: 25289 - DNA, 20 bp, Artificial Sequence
  Description of Artificial Sequence: Synthetic oligonucleotide
  Target: PCSK9; (+) strand; PAM type: YTN; PAM sequence: TTC
agcagatgctaggtacggaa

SEQ ID NO: 25290 - DNA, 20 bp, Artificial Sequence
  Description of Artificial Sequence: Synthetic oligonucleotide
  Target: PCSK9; (+) strand; PAM type: YTN; PAM sequence: CTA
ggtacggaaactcgctgaag

SEQ ID NO: 25291 - DNA, 20 bp, Artificial Sequence
  Description of Artificial Sequence: Synthetic oligonucleotide
  Target: PCSK9; (+) strand; PAM type: YTN; PAM sequence: CTC
gctgaagtgggggcaggtta

SEQ ID NO: 25292 - DNA, 20 bp, Artificial Sequence
  Description of Artificial Sequence: Synthetic oligonucleotide
  Target: PCSK9; (+) strand; PAM type: YTN; PAM sequence: CTG
aagtgggggcaggttaagaa

SEQ ID NO: 25293 - DNA, 20 bp, Artificial Sequence
  Description of Artificial Sequence: Synthetic oligonucleotide
  Target: PCSK9; (+) strand; PAM type: YTN; PAM sequence: TTA
agaagcctctggggatacga

SEQ ID NO: 25294 - DNA, 20 bp, Artificial Sequence
  Description of Artificial Sequence: Synthetic oligonucleotide
  Target: PCSK9; (+) strand; PAM type: YTN; PAM sequence: CTC
tggggatacgaaggcatcca

SEQ ID NO: 25295 - DNA, 20 bp, Artificial Sequence
  Description of Artificial Sequence: Synthetic oligonucleotide
  Target: PCSK9; (+) strand; PAM type: YTN; PAM sequence: CTG
gggatacgaaggcatccagg

SEQ ID NO: 25296 - DNA, 20 bp, Artificial Sequence
  Description of Artificial Sequence: Synthetic oligonucleotide
  Target: PCSK9; (+) strand; PAM type: YTN; PAM sequence: CTA
gttgtggcaggaggctgtta

SEQ ID NO: 25297 - DNA, 20 bp, Artificial Sequence
  Description of Artificial Sequence: Synthetic oligonucleotide
  Target: PCSK9; (+) strand; PAM type: YTN; PAM sequence: TTG
tggcaggaggctgttaccac

SEQ ID NO: 25298 - DNA, 20 bp, Artificial Sequence
  Description of Artificial Sequence: Synthetic oligonucleotide
  Target: PCSK9; (+) strand; PAM type: YTN; PAM sequence: CTG
ttaccacttaggtctgaagg

SEQ ID NO: 25299 - DNA, 20 bp, Artificial Sequence
  Description of Artificial Sequence: Synthetic oligonucleotide
  Target: PCSK9; (+) strand; PAM type: YTN; PAM sequence: TTA
ccacttaggtctgaagggta

SEQ ID NO: 25300 - DNA, 20 bp, Artificial Sequence
  Description of Artificial Sequence: Synthetic oligonucleotide
  Target: PCSK9; (+) strand; PAM type: YTN; PAM sequence: CTT
aggtctgaagggtaaggaga

SEQ ID NO: 25301 - DNA, 20 bp, Artificial Sequence
  Description of Artificial Sequence: Synthetic oligonucleotide
  Target: PCSK9; (+) strand; PAM type: YTN; PAM sequence: TTA
ggtctgaagggtaaggagag

SEQ ID NO: 25302 - DNA, 20 bp, Artificial Sequence
  Description of Artificial Sequence: Synthetic oligonucleotide
  Target: PCSK9; (+) strand; PAM type: YTN; PAM sequence: CTG
aagggtaaggagagggaata

SEQ ID NO: 25303 - DNA, 20 bp, Artificial Sequence
  Description of Artificial Sequence: Synthetic oligonucleotide
  Target: PCSK9; (+) strand; PAM type: YTN; PAM sequence: CTT
tccctctgcccagttggagc

SEQ ID NO: 25304 - DNA, 20 bp, Artificial Sequence
  Description of Artificial Sequence: Synthetic oligonucleotide
  Target: PCSK9; (+) strand; PAM type: YTN; PAM sequence: TTT
ccctctgcccagttggagcc

SEQ ID NO: 25305 - DNA, 20 bp, Artificial Sequence
  Description of Artificial Sequence: Synthetic oligonucleotide
  Target: PCSK9; (+) strand; PAM type: YTN; PAM sequence: TTC
cctctgcccagttggagccg

SEQ ID NO: 25306 - DNA, 20 bp, Artificial Sequence
  Description of Artificial Sequence: Synthetic oligonucleotide
  Target: PCSK9; (+) strand; PAM type: YTN; PAM sequence: CTC
tgcccagttggagccggtgg

SEQ ID NO: 25307 - DNA, 20 bp, Artificial Sequence
  Description of Artificial Sequence: Synthetic oligonucleotide
  Target: PCSK9; (+) strand; PAM type: YTN; PAM sequence: CTG
cccagttggagccggtggca

SEQ ID NO: 25308 - DNA, 20 bp, Artificial Sequence
  Description of Artificial Sequence: Synthetic oligonucleotide
  Target: PCSK9; (+) strand; PAM type: YTN; PAM sequence: TTG
gagccggtggcatggaggag

SEQ ID NO: 25309 - DNA, 20 bp, Artificial Sequence
  Description of Artificial Sequence: Synthetic oligonucleotide
  Target: PCSK9; (+) strand; PAM type: YTN; PAM sequence: CTG
cctgtggggaatcacccgag

SEQ ID NO: 25310 - DNA, 20 bp, Artificial Sequence
  Description of Artificial Sequence: Synthetic oligonucleotide
  Target: PCSK9; (+) strand; PAM type: YTN; PAM sequence: CTG
tggggaatcacccgagggtt

SEQ ID NO: 25311 - DNA, 20 bp, Artificial Sequence
  Description of Artificial Sequence: Synthetic oligonucleotide
  Target: PCSK9; (+) strand; PAM type: YTN; PAM sequence: TTC
accgctgccatgcgcaggga

SEQ ID NO: 25312 - DNA, 20 bp, Artificial Sequence
  Description of Artificial Sequence: Synthetic oligonucleotide
  Target: PCSK9; (+) strand; PAM type: YTN; PAM sequence: CTG
ccatgcgcagggagtcagga

SEQ ID NO: 25313 - DNA, 20 bp, Artificial Sequence
  Description of Artificial Sequence: Synthetic oligonucleotide
  Target: PCSK9; (+) strand; PAM type: YTN; PAM sequence: TTT
ttttttttttttgagactct

SEQ ID NO: 25314 - DNA, 20 bp, Artificial Sequence
  Description of Artificial Sequence: Synthetic oligonucleotide
  Target: PCSK9; (+) strand; PAM type: YTN; PAM sequence: TTT
tttttttttttgagactctg

SEQ ID NO: 25315 - DNA, 20 bp, Artificial Sequence
  Description of Artificial Sequence: Synthetic oligonucleotide
  Target: PCSK9; (+) strand; PAM type: YTN; PAM sequence: TTT
ttttttttttgagactctgt

SEQ ID NO: 25316 - DNA, 20 bp, Artificial Sequence
  Description of Artificial Sequence: Synthetic oligonucleotide
  Target: PCSK9; (+) strand; PAM type: YTN; PAM sequence: TTT
tttttttttgagactctgtt

SEQ ID NO: 25317 - DNA, 20 bp, Artificial Sequence
  Description of Artificial Sequence: Synthetic oligonucleotide
  Target: PCSK9; (+) strand; PAM type: YTN; PAM sequence: TTT
ttttttttgagactctgttg

SEQ ID NO: 25318 - DNA, 20 bp, Artificial Sequence
  Description of Artificial Sequence: Synthetic oligonucleotide
  Target: PCSK9; (+) strand; PAM type: YTN; PAM sequence: TTT
tttttttgagactctgttgc

SEQ ID NO: 25319 - DNA, 20 bp, Artificial Sequence
  Description of Artificial Sequence: Synthetic oligonucleotide
  Target: PCSK9; (+) strand; PAM type: YTN; PAM sequence: TTT
ttttttgagactctgttgcc

SEQ ID NO: 25320 - DNA, 20 bp, Artificial Sequence
  Description of Artificial Sequence: Synthetic oligonucleotide
  Target: PCSK9; (+) strand; PAM type: YTN; PAM sequence: TTT
tttttgagactctgttgccc

SEQ ID NO: 25321 - DNA, 20 bp, Artificial Sequence
  Description of Artificial Sequence: Synthetic oligonucleotide
  Target: PCSK9; (+) strand; PAM type: YTN; PAM sequence: TTT
ttttgagactctgttgccca

SEQ ID NO: 25322 - DNA, 20 bp, Artificial Sequence
  Description of Artificial Sequence: Synthetic oligonucleotide
  Target: PCSK9; (+) strand; PAM type: YTN; PAM sequence: TTT
tttgagactctgttgcccag

SEQ ID NO: 25323 - DNA, 20 bp, Artificial Sequence
  Description of Artificial Sequence: Synthetic oligonucleotide
  Target: PCSK9; (+) strand; PAM type: YTN; PAM sequence: TTT
ttgagactctgttgcccaga

SEQ ID NO: 25324 - DNA, 20 bp, Artificial Sequence
  Description of Artificial Sequence: Synthetic oligonucleotide
  Target: PCSK9; (+) strand; PAM type: YTN; PAM sequence: TTT
tgagactctgttgcccagac

SEQ ID NO: 25325 - DNA, 20 bp, Artificial Sequence
  Description of Artificial Sequence: Synthetic oligonucleotide
  Target: PCSK9; (+) strand; PAM type: YTN; PAM sequence: TTT
gagactctgttgcccagact

SEQ ID NO: 25326 - DNA, 20 bp, Artificial Sequence
  Description of Artificial Sequence: Synthetic oligonucleotide
  Target: PCSK9; (+) strand; PAM type: YTN; PAM sequence: TTG
agactctgttgcccagactg

SEQ ID NO: 25327 - DNA, 20 bp, Artificial Sequence
  Description of Artificial Sequence: Synthetic oligonucleotide
  Target: PCSK9; (+) strand; PAM type: YTN; PAM sequence: CTC
tgttgcccagactggagtgc

SEQ ID NO: 25328 - DNA, 20 bp, Artificial Sequence
  Description of Artificial Sequence: Synthetic oligonucleotide
  Target: PCSK9; (+) strand; PAM type: YTN; PAM sequence: CTG
ttgcccagactggagtgcag

SEQ ID NO: 25329 - DNA, 20 bp, Artificial Sequence
  Description of Artificial Sequence: Synthetic oligonucleotide
  Target: PCSK9; (+) strand; PAM type: YTN; PAM sequence: TTG
cccagactggagtgcagtgg

SEQ ID NO: 25330 - DNA, 20 bp, Artificial Sequence
  Description of Artificial Sequence: Synthetic oligonucleotide
  Target: PCSK9; (+) strand; PAM type: YTN; PAM sequence: CTG
gagtgcagtggtgccatatc

SEQ ID NO: 25331 - DNA, 20 bp, Artificial Sequence
  Description of Artificial Sequence: Synthetic oligonucleotide
  Target: PCSK9; (+) strand; PAM type: YTN; PAM sequence: CTG
cacctctgcctcccgggttc

SEQ ID NO: 25332 - DNA, 20 bp, Artificial Sequence
  Description of Artificial Sequence: Synthetic oligonucleotide
  Target: PCSK9; (+) strand; PAM type: YTN; PAM sequence: CTC
tgcctcccgggttcaagctc

SEQ ID NO: 25333 - DNA, 20 bp, Artificial Sequence
  Description of Artificial Sequence: Synthetic oligonucleotide
  Target: PCSK9; (+) strand; PAM type: YTN; PAM sequence: CTG
cctcccgggttcaagctcac

SEQ ID NO: 25334 - DNA, 20 bp, Artificial Sequence
  Description of Artificial Sequence: Synthetic oligonucleotide
  Target: PCSK9; (+) strand; PAM type: YTN; PAM sequence: CTC
ccgggttcaagctcactgca

SEQ ID NO: 25335 - DNA, 20 bp, Artificial Sequence
  Description of Artificial Sequence: Synthetic oligonucleotide
  Target: PCSK9; (+) strand; PAM type: YTN; PAM sequence: TTC
aagctcactgcaacctctgc

SEQ ID NO: 25336 - DNA, 20 bp, Artificial Sequence
  Description of Artificial Sequence: Synthetic oligonucleotide
  Target: PCSK9; (+) strand; PAM type: YTN; PAM sequence: CTC
actgcaacctctgcctcccg

SEQ ID NO: 25337 - DNA, 20 bp, Artificial Sequence
  Description of Artificial Sequence: Synthetic oligonucleotide
  Target: PCSK9; (+) strand; PAM type: YTN; PAM sequence: CTG
caacctctgcctcccgggtt

SEQ ID NO: 25338 - DNA, 20 bp, Artificial Sequence
  Description of Artificial Sequence: Synthetic oligonucleotide
  Target: PCSK9; (+) strand; PAM type: YTN; PAM sequence: CTC
tgcctcccgggttcaagcga

SEQ ID NO: 25339 - DNA, 20 bp, Artificial Sequence
  Description of Artificial Sequence: Synthetic oligonucleotide
  Target: PCSK9; (+) strand; PAM type: YTN; PAM sequence: CTG
cctcccgggttcaagcgatt

SEQ ID NO: 25340 - DNA, 20 bp, Artificial Sequence
  Description of Artificial Sequence: Synthetic oligonucleotide
  Target: PCSK9; (+) strand; PAM type: YTN; PAM sequence: CTC
ccgggttcaagcgattctcc

SEQ ID NO: 25341 - DNA, 20 bp, Artificial Sequence
  Description of Artificial Sequence: Synthetic oligonucleotide
  Target: PCSK9; (+) strand; PAM type: YTN; PAM sequence: TTC
aagcgattctcctgcctcag

SEQ ID NO: 25342 - DNA, 20 bp, Artificial Sequence
  Description of Artificial Sequence: Synthetic oligonucleotide
  Target: PCSK9; (+) strand; PAM type: YTN; PAM sequence: TTC
tcctgcctcagcctcccgag

SEQ ID NO: 25343 - DNA, 20 bp, Artificial Sequence
  Description of Artificial Sequence: Synthetic oligonucleotide
  Target: PCSK9; (+) strand; PAM type: YTN; PAM sequence: CTC
ctgcctcagcctcccgagta

SEQ ID NO: 25344 - DNA, 20 bp, Artificial Sequence
  Description of Artificial Sequence: Synthetic oligonucleotide
  Target: PCSK9; (+) strand; PAM type: YTN; PAM sequence: CTG
cctcagcctcccgagtagct

SEQ ID NO: 25345 - DNA, 20 bp, Artificial Sequence
  Description of Artificial Sequence: Synthetic oligonucleotide
  Target: PCSK9; (+) strand; PAM type: YTN; PAM sequence: CTC
agcctcccgagtagctggga

SEQ ID NO: 25346 - DNA, 20 bp, Artificial Sequence
  Description of Artificial Sequence: Synthetic oligonucleotide
  Target: PCSK9; (+) strand; PAM type: YTN; PAM sequence: CTC
ccgagtagctgggactacag

SEQ ID NO: 25347 - DNA, 20 bp, Artificial Sequence
  Description of Artificial Sequence: Synthetic oligonucleotide
  Target: PCSK9; (+) strand; PAM type: YTN; PAM sequence: CTG
ggactacaggtgtgtgccac

SEQ ID NO: 25348 - DNA, 20 bp, Artificial Sequence
  Description of Artificial Sequence: Synthetic oligonucleotide
  Target: PCSK9; (+) strand; PAM type: YTN; PAM sequence: CTA
caggtgtgtgccaccatgcc

SEQ ID NO: 25349 - DNA, 20 bp, Artificial Sequence
  Description of Artificial Sequence: Synthetic oligonucleotide
  Target: PCSK9; (+) strand; PAM type: YTN; PAM sequence: CTG
gctaatttttgtatttttaa

SEQ ID NO: 25350 - DNA, 20 bp, Artificial Sequence
  Description of Artificial Sequence: Synthetic oligonucleotide
  Target: PCSK9; (+) strand; PAM type: YTN; PAM sequence: CTA
atttttgtatttttaataga

SEQ ID NO: 25351 - DNA, 20 bp, Artificial Sequence
  Description of Artificial Sequence: Synthetic oligonucleotide
  Target: PCSK9; (+) strand; PAM type: YTN; PAM sequence: TTT
ttgtatttttaatagagatg

SEQ ID NO: 25352 - DNA, 20 bp, Artificial Sequence
  Description of Artificial Sequence: Synthetic oligonucleotide
  Target: PCSK9; (+) strand; PAM type: YTN; PAM sequence: TTT
tgtatttttaatagagatgg

SEQ ID NO: 25353 - DNA, 20 bp, Artificial Sequence
  Description of Artificial Sequence: Synthetic oligonucleotide
  Target: PCSK9; (+) strand; PAM type: YTN; PAM sequence: TTT
gtatttttaatagagatggg

SEQ ID NO: 25354 - DNA, 20 bp, Artificial Sequence
  Description of Artificial Sequence: Synthetic oligonucleotide
  Target: PCSK9; (+) strand; PAM type: YTN; PAM sequence: TTG
tatttttaatagagatgggg

SEQ ID NO: 25355 - DNA, 20 bp, Artificial Sequence
  Description of Artificial Sequence: Synthetic oligonucleotide
  Target: PCSK9; (+) strand; PAM type: YTN; PAM sequence: TTT
ttaatagagatggggtttca

SEQ ID NO: 25356 - DNA, 20 bp, Artificial Sequence
  Description of Artificial Sequence: Synthetic oligonucleotide
  Target: PCSK9; (+) strand; PAM type: YTN; PAM sequence: TTT
taatagagatggggtttcac

SEQ ID NO: 25357 - DNA, 20 bp, Artificial Sequence
  Description of Artificial Sequence: Synthetic oligonucleotide
  Target: PCSK9; (+) strand; PAM type: YTN; PAM sequence: TTT
aatagagatggggtttcacc

SEQ ID NO: 25358 - DNA, 20 bp, Artificial Sequence
  Description of Artificial Sequence: Synthetic oligonucleotide
  Target: PCSK9; (+) strand; PAM type: YTN; PAM sequence: TTA
atagagatggggtttcacca

SEQ ID NO: 25359 - DNA, 20 bp, Artificial Sequence
  Description of Artificial Sequence: Synthetic oligonucleotide
  Target: PCSK9; (+) strand; PAM type: YTN; PAM sequence: TTT
caccatgttggccaggctgg

SEQ ID NO: 25360 - DNA, 20 bp, Artificial Sequence
  Description of Artificial Sequence: Synthetic oligonucleotide
  Target: PCSK9; (+) strand; PAM type: YTN; PAM sequence: TTC
accatgttggccaggctggt

SEQ ID NO: 25361 - DNA, 20 bp, Artificial Sequence
  Description of Artificial Sequence: Synthetic oligonucleotide
  Target: PCSK9; (+) strand; PAM type: YTN; PAM sequence: TTG
gccaggctggtctcgaactc

SEQ ID NO: 25362 - DNA, 20 bp, Artificial Sequence
  Description of Artificial Sequence: Synthetic oligonucleotide
  Target: PCSK9; (+) strand; PAM type: YTN; PAM sequence: CTG
gtctcgaactctcgacctca

SEQ ID NO: 25363 - DNA, 20 bp, Artificial Sequence
  Description of Artificial Sequence: Synthetic oligonucleotide
  Target: PCSK9; (+) strand; PAM type: YTN; PAM sequence: CTC
gaactctcgacctcaggtga

SEQ ID NO: 25364 - DNA, 20 bp, Artificial Sequence
  Description of Artificial Sequence: Synthetic oligonucleotide
  Target: PCSK9; (+) strand; PAM type: YTN; PAM sequence: CTC
tcgacctcaggtgatccccc

SEQ ID NO: 25365 - DNA, 20 bp, Artificial Sequence
  Description of Artificial Sequence: Synthetic oligonucleotide
  Target: PCSK9; (+) strand; PAM type: YTN; PAM sequence: CTC
gacctcaggtgatcccccac

SEQ ID NO: 25366 - DNA, 20 bp, Artificial Sequence
  Description of Artificial Sequence: Synthetic oligonucleotide
  Target: PCSK9; (+) strand; PAM type: YTN; PAM sequence: CTC
aggtgatcccccacctcggc

SEQ ID NO: 25367 - DNA, 20 bp, Artificial Sequence
  Description of Artificial Sequence: Synthetic oligonucleotide
  Target: PCSK9; (+) strand; PAM type: YTN; PAM sequence: CTC
ggcctcccaaagtgctggga

SEQ ID NO: 25368 - DNA, 20 bp, Artificial Sequence
  Description of Artificial Sequence: Synthetic oligonucleotide
  Target: PCSK9; (+) strand; PAM type: YTN; PAM sequence: CTC
ccaaagtgctgggattacag

SEQ ID NO: 25369 - DNA, 20 bp, Artificial Sequence
  Description of Artificial Sequence: Synthetic oligonucleotide
  Target: PCSK9; (+) strand; PAM type: YTN; PAM sequence: CTG
ggattacaggcgtgagtcac

SEQ ID NO: 25370 - DNA, 20 bp, Artificial Sequence
  Description of Artificial Sequence: Synthetic oligonucleotide
  Target: PCSK9; (+) strand; PAM type: YTN; PAM sequence: TTA
caggcgtgagtcaccgctcc

SEQ ID NO: 25371 - DNA, 20 bp, Artificial Sequence
  Description of Artificial Sequence: Synthetic oligonucleotide
  Target: PCSK9; (+) strand; PAM type: YTN; PAM sequence: CTC
ccagctgctgatgcactctt

SEQ ID NO: 25372 - DNA, 20 bp, Artificial Sequence
  Description of Artificial Sequence: Synthetic oligonucleotide
  Target: PCSK9; (+) strand; PAM type: YTN; PAM sequence: CTG
ctgatgcactcttgtccttc

SEQ ID NO: 25373 - DNA, 20 bp, Artificial Sequence
  Description of Artificial Sequence: Synthetic oligonucleotide
  Target: PCSK9; (+) strand; PAM type: YTN; PAM sequence: CTG
atgcactcttgtccttctaa

SEQ ID NO: 25374 - DNA, 20 bp, Artificial Sequence
  Description of Artificial Sequence: Synthetic oligonucleotide
  Target: PCSK9; (+) strand; PAM type: YTN; PAM sequence: CTC
ttgtccttctaactcctgct

SEQ ID NO: 25375 - DNA, 20 bp, Artificial Sequence
  Description of Artificial Sequence: Synthetic oligonucleotide
  Target: PCSK9; (+) strand; PAM type: YTN; PAM sequence: CTT
gtccttctaactcctgctag

SEQ ID NO: 25376 - DNA, 20 bp, Artificial Sequence
  Description of Artificial Sequence: Synthetic oligonucleotide
  Target: PCSK9; (+) strand; PAM type: YTN; PAM sequence: TTG
tccttctaactcctgctagt

SEQ ID NO: 25377 - DNA, 20 bp, Artificial Sequence
  Description of Artificial Sequence: Synthetic oligonucleotide
  Target: PCSK9; (+) strand; PAM type: YTN; PAM sequence: CTT
ctaactcctgctagtgcctc

SEQ ID NO: 25378 - DNA, 20 bp, Artificial Sequence
  Description of Artificial Sequence: Synthetic oligonucleotide
  Target: PCSK9; (+) strand; PAM type: YTN; PAM sequence: TTC
taactcctgctagtgcctcc

SEQ ID NO: 25379 - DNA, 20 bp, Artificial Sequence
  Description of Artificial Sequence: Synthetic oligonucleotide
  Target: PCSK9; (+) strand; PAM type: YTN; PAM sequence: CTA
actcctgctagtgcctccca

SEQ ID NO: 25380 - DNA, 20 bp, Artificial Sequence
  Description of Artificial Sequence: Synthetic oligonucleotide
  Target: PCSK9; (+) strand; PAM type: YTN; PAM sequence: CTC
ctgctagtgcctcccattgg

SEQ ID NO: 25381 - DNA, 20 bp, Artificial Sequence
  Description of Artificial Sequence: Synthetic oligonucleotide
  Target: PCSK9; (+) strand; PAM type: YTN; PAM sequence: CTG
ctagtgcctcccattggctg

SEQ ID NO: 25382 - DNA, 20 bp, Artificial Sequence
  Description of Artificial Sequence: Synthetic oligonucleotide
  Target: PCSK9; (+) strand; PAM type: YTN; PAM sequence: CTA
gtgcctcccattggctgagc

SEQ ID NO: 25383 - DNA, 20 bp, Artificial Sequence
  Description of Artificial Sequence: Synthetic oligonucleotide
  Target: PCSK9; (+) strand; PAM type: YTN; PAM sequence: CTC
ccattggctgagcccaactg

SEQ ID NO: 25384 - DNA, 20 bp, Artificial Sequence
  Description of Artificial Sequence: Synthetic oligonucleotide
  Target: PCSK9; (+) strand; PAM type: YTN; PAM sequence: TTG
gctgagcccaactggaagct

SEQ ID NO: 25385 - DNA, 20 bp, Artificial Sequence
  Description of Artificial Sequence: Synthetic oligonucleotide
  Target: PCSK9; (+) strand; PAM type: YTN; PAM sequence: CTG
agcccaactggaagctttgc

SEQ ID NO: 25386 - DNA, 20 bp, Artificial Sequence
  Description of Artificial Sequence: Synthetic oligonucleotide
  Target: PCSK9; (+) strand; PAM type: YTN; PAM sequence: CTG
gaagctttgcaagggagctg

SEQ ID NO: 25387 - DNA, 20 bp, Artificial Sequence
  Description of Artificial Sequence: Synthetic oligonucleotide
  Target: PCSK9; (+) strand; PAM type: YTN; PAM sequence: CTT
tgcaagggagctggtgctgc

SEQ ID NO: 25388 - DNA, 20 bp, Artificial Sequence
  Description of Artificial Sequence: Synthetic oligonucleotide
  Target: PCSK9; (+) strand; PAM type: YTN; PAM sequence: TTT
gcaagggagctggtgctgca

SEQ ID NO: 25389 - DNA, 20 bp, Artificial Sequence
  Description of Artificial Sequence: Synthetic oligonucleotide
  Target: PCSK9; (+) strand; PAM type: YTN; PAM sequence: TTG
caagggagctggtgctgcag

SEQ ID NO: 25390 - DNA, 20 bp, Artificial Sequence
  Description of Artificial Sequence: Synthetic oligonucleotide
  Target: PCSK9; (+) strand; PAM type: YTN; PAM sequence: CTG
gtgctgcagtttgcactgag

SEQ ID NO: 25391 - DNA, 20 bp, Artificial Sequence
  Description of Artificial Sequence: Synthetic oligonucleotide
  Target: PCSK9; (+) strand; PAM type: YTN; PAM sequence: CTG
cagtttgcactgagcaggct

SEQ ID NO: 25392 - DNA, 20 bp, Artificial Sequence
  Description of Artificial Sequence: Synthetic oligonucleotide
  Target: PCSK9; (+) strand; PAM type: YTN; PAM sequence: TTT
gcactgagcaggctggagaa

SEQ ID NO: 25393 - DNA, 20 bp, Artificial Sequence
  Description of Artificial Sequence: Synthetic oligonucleotide
  Target: PCSK9; (+) strand; PAM type: YTN; PAM sequence: TTG
cactgagcaggctggagaag

SEQ ID NO: 25394 - DNA, 20 bp, Artificial Sequence
  Description of Artificial Sequence: Synthetic oligonucleotide
  Target: PCSK9; (+) strand; PAM type: YTN; PAM sequence: CTG
agcaggctggagaaggctgg

SEQ ID NO: 25395 - DNA, 20 bp, Artificial Sequence
  Description of Artificial Sequence: Synthetic oligonucleotide
  Target: PCSK9; (+) strand; PAM type: YTN; PAM sequence: CTG
gagaaggctggagaatagac

SEQ ID NO: 25396 - DNA, 20 bp, Artificial Sequence
  Description of Artificial Sequence: Synthetic oligonucleotide
  Target: PCSK9; (+) strand; PAM type: YTN; PAM sequence: CTG
gagaatagactaggggacaa

SEQ ID NO: 25397 - DNA, 20 bp, Artificial Sequence
  Description of Artificial Sequence: Synthetic oligonucleotide
  Target: PCSK9; (+) strand; PAM type: YTN; PAM sequence: CTA
ggggacaaaccgaattgcca

SEQ ID NO: 25398 - DNA, 20 bp, Artificial Sequence
  Description of Artificial Sequence: Synthetic oligonucleotide
  Target: PCSK9; (+) strand; PAM type: YTN; PAM sequence: TTG
ccagtgctgttatgtcatga

SEQ ID NO: 25399 - DNA, 20 bp, Artificial Sequence
  Description of Artificial Sequence: Synthetic oligonucleotide
  Target: PCSK9; (+) strand; PAM type: YTN; PAM sequence: CTG
ttatgtcatgatttaggcat

SEQ ID NO: 25400 - DNA, 20 bp, Artificial Sequence
  Description of Artificial Sequence: Synthetic oligonucleotide
  Target: PCSK9; (+) strand; PAM type: YTN; PAM sequence: TTA
tgtcatgatttaggcatgga

SEQ ID NO: 25401 - DNA, 20 bp, Artificial Sequence
  Description of Artificial Sequence: Synthetic oligonucleotide
  Target: PCSK9; (+) strand; PAM type: YTN; PAM sequence: TTT
aggcatggagtccagggcct

SEQ ID NO: 25402 - DNA, 20 bp, Artificial Sequence
  Description of Artificial Sequence: Synthetic oligonucleotide
  Target: PCSK9; (+) strand; PAM type: YTN; PAM sequence: TTA
ggcatggagtccagggcctg

SEQ ID NO: 25403 - DNA, 20 bp, Artificial Sequence
  Description of Artificial Sequence: Synthetic oligonucleotide
  Target: PCSK9; (+) strand; PAM type: YTN; PAM sequence: CTG
agcttcactccatgtccatc

SEQ ID NO: 25404 - DNA, 20 bp, Artificial Sequence
  Description of Artificial Sequence: Synthetic oligonucleotide
  Target: PCSK9; (+) strand; PAM type: YTN; PAM sequence: CTT
cactccatgtccatcctgcc

SEQ ID NO: 25405 - DNA, 20 bp, Artificial Sequence
  Description of Artificial Sequence: Synthetic oligonucleotide
  Target: PCSK9; (+) strand; PAM type: YTN; PAM sequence: TTC
actccatgtccatcctgccc

SEQ ID NO: 25406 - DNA, 20 bp, Artificial Sequence
  Description of Artificial Sequence: Synthetic oligonucleotide
  Target: PCSK9; (+) strand; PAM type: YTN; PAM sequence: CTC
catgtccatcctgcccagag

SEQ ID NO: 25407 - DNA, 20 bp, Artificial Sequence
  Description of Artificial Sequence: Synthetic oligonucleotide
  Target: PCSK9; (+) strand; PAM type: YTN; PAM sequence: CTG
cccagagccttggcacagcc

SEQ ID NO: 25408 - DNA, 20 bp, Artificial Sequence
  Description of Artificial Sequence: Synthetic oligonucleotide
  Target: PCSK9; (+) strand; PAM type: YTN; PAM sequence: CTT
ggcacagcctggctcccaga

SEQ ID NO: 25409 - DNA, 20 bp, Artificial Sequence
  Description of Artificial Sequence: Synthetic oligonucleotide
  Target: PCSK9; (+) strand; PAM type: YTN; PAM sequence: TTG
gcacagcctggctcccagac

SEQ ID NO: 25410 - DNA, 20 bp, Artificial Sequence
  Description of Artificial Sequence: Synthetic oligonucleotide
  Target: PCSK9; (+) strand; PAM type: YTN; PAM sequence: CTG
gctcccagacaagatgtcaa

SEQ ID NO: 25411 - DNA, 20 bp, Artificial Sequence
  Description of Artificial Sequence: Synthetic oligonucleotide
  Target: PCSK9; (+) strand; PAM type: YTN; PAM sequence: CTC
ccagacaagatgtcaagttc

SEQ ID NO: 25412 - DNA, 20 bp, Artificial Sequence
  Description of Artificial Sequence: Synthetic oligonucleotide
  Target: PCSK9; (+) strand; PAM type: YTN; PAM sequence: TTC
agaatccttcctaaaaggaa

SEQ ID NO: 25413 - DNA, 20 bp, Artificial Sequence
  Description of Artificial Sequence: Synthetic oligonucleotide
  Target: PCSK9; (+) strand; PAM type: YTN; PAM sequence: CTT
cctaaaaggaatcctctatg

SEQ ID NO: 25414 - DNA, 20 bp, Artificial Sequence
  Description of Artificial Sequence: Synthetic oligonucleotide
  Target: PCSK9; (+) strand; PAM type: YTN; PAM sequence: TTC
ctaaaaggaatcctctatgc

SEQ ID NO: 25415 - DNA, 20 bp, Artificial Sequence
  Description of Artificial Sequence: Synthetic oligonucleotide
  Target: PCSK9; (+) strand; PAM type: YTN; PAM sequence: CTA
aaaggaatcctctatgccag

SEQ ID NO: 25416 - DNA, 20 bp, Artificial Sequence
  Description of Artificial Sequence: Synthetic oligonucleotide
  Target: PCSK9; (+) strand; PAM type: YTN; PAM sequence: CTC
tatgccagaccgtgttgcag

SEQ ID NO: 25417 - DNA, 20 bp, Artificial Sequence
  Description of Artificial Sequence: Synthetic oligonucleotide
  Target: PCSK9; (+) strand; PAM type: YTN; PAM sequence: CTA
tgccagaccgtgttgcaggg

SEQ ID NO: 25418 - DNA, 20 bp, Artificial Sequence
  Description of Artificial Sequence: Synthetic oligonucleotide
  Target: PCSK9; (+) strand; PAM type: YTN; PAM sequence: TTG
cagggatatgggagtgctgg

SEQ ID NO: 25419 - DNA, 20 bp, Artificial Sequence
  Description of Artificial Sequence: Synthetic oligonucleotide
  Target: PCSK9; (+) strand; PAM type: YTN; PAM sequence: CTG
ggctcccagcctgatcaagg

SEQ ID NO: 25420 - DNA, 20 bp, Artificial Sequence
  Description of Artificial Sequence: Synthetic oligonucleotide
  Target: PCSK9; (+) strand; PAM type: YTN; PAM sequence: CTC
ccagcctgatcaaggagcga

SEQ ID NO: 25421 - DNA, 20 bp, Artificial Sequence
  Description of Artificial Sequence: Synthetic oligonucleotide
  Target: PCSK9; (+) strand; PAM type: YTN; PAM sequence: CTG
atcaaggagcgagaaaactc

SEQ ID NO: 25422 - DNA, 20 bp, Artificial Sequence
  Description of Artificial Sequence: Synthetic oligonucleotide
  Target: PCSK9; (+) strand; PAM type: YTN; PAM sequence: CTC
aggctcctagtctgtcctcc

SEQ ID NO: 25423 - DNA, 20 bp, Artificial Sequence
  Description of Artificial Sequence: Synthetic oligonucleotide
  Target: PCSK9; (+) strand; PAM type: YTN; PAM sequence: CTC
ctagtctgtcctccggggca

SEQ ID NO: 25424 - DNA, 20 bp, Artificial Sequence
  Description of Artificial Sequence: Synthetic oligonucleotide
  Target: PCSK9; (+) strand; PAM type: YTN; PAM sequence: CTA
gtctgtcctccggggcacta

SEQ ID NO: 25425 - DNA, 20 bp, Artificial Sequence
  Description of Artificial Sequence: Synthetic oligonucleotide
  Target: PCSK9; (+) strand; PAM type: YTN; PAM sequence: CTG
tcctccggggcactagcagg

SEQ ID NO: 25426 - DNA, 20 bp, Artificial Sequence
  Description of Artificial Sequence: Synthetic oligonucleotide
  Target: PCSK9; (+) strand; PAM type: YTN; PAM sequence: CTC
cggggcactagcagggacaa

SEQ ID NO: 25427 - DNA, 20 bp, Artificial Sequence
  Description of Artificial Sequence: Synthetic oligonucleotide
  Target: PCSK9; (+) strand; PAM type: YTN; PAM sequence: CTA
gcagggacaaggtgggaggc

SEQ ID NO: 25428 - DNA, 20 bp, Artificial Sequence
  Description of Artificial Sequence: Synthetic oligonucleotide
  Target: PCSK9; (+) strand; PAM type: YTN; PAM sequence: CTG
ctgggctgggatgtggggac

SEQ ID NO: 25429 - DNA, 20 bp, Artificial Sequence
  Description of Artificial Sequence: Synthetic oligonucleotide
  Target: PCSK9; (+) strand; PAM type: YTN; PAM sequence: CTG
ggctgggatgtggggacagg

SEQ ID NO: 25430 - DNA, 20 bp, Artificial Sequence
  Description of Artificial Sequence: Synthetic oligonucleotide
  Target: PCSK9; (+) strand; PAM type: YTN; PAM sequence: CTG
ggatgtggggacaggtttga

SEQ ID NO: 25431 - DNA, 20 bp, Artificial Sequence
  Description of Artificial Sequence: Synthetic oligonucleotide
  Target: PCSK9; (+) strand; PAM type: YTN; PAM sequence: TTT
gatcaggtaaggccaggctg

SEQ ID NO: 25432 - DNA, 20 bp, Artificial Sequence
  Description of Artificial Sequence: Synthetic oligonucleotide
  Target: PCSK9; (+) strand; PAM type: YTN; PAM sequence: TTG
atcaggtaaggccaggctgt

SEQ ID NO: 25433 - DNA, 20 bp, Artificial Sequence
  Description of Artificial Sequence: Synthetic oligonucleotide
  Target: PCSK9; (+) strand; PAM type: YTN; PAM sequence: CTG
tggctgtgtttgctgctgtc

SEQ ID NO: 25434 - DNA, 20 bp, Artificial Sequence
  Description of Artificial Sequence: Synthetic oligonucleotide
  Target: PCSK9; (+) strand; PAM type: YTN; PAM sequence: CTG
tgtttgctgctgtccaaatg

SEQ ID NO: 25435 - DNA, 20 bp, Artificial Sequence
  Description of Artificial Sequence: Synthetic oligonucleotide
  Target: PCSK9; (+) strand; PAM type: YTN; PAM sequence: TTT
gctgctgtccaaatggctta

SEQ ID NO: 25436 - DNA, 20 bp, Artificial Sequence
  Description of Artificial Sequence: Synthetic oligonucleotide
  Target: PCSK9; (+) strand; PAM type: YTN; PAM sequence: TTG
ctgctgtccaaatggcttaa

SEQ ID NO: 25437 - DNA, 20 bp, Artificial Sequence
  Description of Artificial Sequence: Synthetic oligonucleotide
  Target: PCSK9; (+) strand; PAM type: YTN; PAM sequence: CTG
ctgtccaaatggcttaagca

SEQ ID NO: 25438 - DNA, 20 bp, Artificial Sequence
  Description of Artificial Sequence: Synthetic oligonucleotide
  Target: PCSK9; (+) strand; PAM type: YTN; PAM sequence: CTG
tccaaatggcttaagcagag

SEQ ID NO: 25439 - DNA, 20 bp, Artificial Sequence
  Description of Artificial Sequence: Synthetic oligonucleotide
  Target: PCSK9; (+) strand; PAM type: YTN; PAM sequence: CTT
aagcagagtcccccggcctc

SEQ ID NO: 25440 - DNA, 20 bp, Artificial Sequence
  Description of Artificial Sequence: Synthetic oligonucleotide
  Target: PCSK9; (+) strand; PAM type: YTN; PAM sequence: TTA
agcagagtcccccggcctct

SEQ ID NO: 25441 - DNA, 20 bp, Artificial Sequence
  Description of Artificial Sequence: Synthetic oligonucleotide
  Target: PCSK9; (+) strand; PAM type: YTN; PAM sequence: CTC
tctggcttctgcaggccttg

SEQ ID NO: 25442 - DNA, 20 bp, Artificial Sequence
  Description of Artificial Sequence: Synthetic oligonucleotide
  Target: PCSK9; (+) strand; PAM type: YTN; PAM sequence: CTC
tggcttctgcaggccttgaa

SEQ ID NO: 25443 - DNA, 20 bp, Artificial Sequence
  Description of Artificial Sequence: Synthetic oligonucleotide
  Target: PCSK9; (+) strand; PAM type: YTN; PAM sequence: CTG
gcttctgcaggccttgaagt

SEQ ID NO: 25444 - DNA, 20 bp, Artificial Sequence
  Description of Artificial Sequence: Synthetic oligonucleotide
  Target: PCSK9; (+) strand; PAM type: YTN; PAM sequence: CTT
ctgcaggccttgaagttgcc

SEQ ID NO: 25445 - DNA, 20 bp, Artificial Sequence
  Description of Artificial Sequence: Synthetic oligonucleotide
  Target: PCSK9; (+) strand; PAM type: YTN; PAM sequence: TTC
tgcaggccttgaagttgccc

SEQ ID NO: 25446 - DNA, 20 bp, Artificial Sequence
  Description of Artificial Sequence: Synthetic oligonucleotide
  Target: PCSK9; (+) strand; PAM type: YTN; PAM sequence: CTG
caggccttgaagttgcccca

SEQ ID NO: 25447 - DNA, 20 bp, Artificial Sequence
  Description of Artificial Sequence: Synthetic oligonucleotide
  Target: PCSK9; (+) strand; PAM type: YTN; PAM sequence: CTT
gaagttgccccatgtcgact

SEQ ID NO: 25448 - DNA, 20 bp, Artificial Sequence
  Description of Artificial Sequence: Synthetic oligonucleotide
  Target: PCSK9; (+) strand; PAM type: YTN; PAM sequence: TTG
aagttgccccatgtcgacta

SEQ ID NO: 25449 - DNA, 20 bp, Artificial Sequence
  Description of Artificial Sequence: Synthetic oligonucleotide
  Target: PCSK9; (+) strand; PAM type: YTN; PAM sequence: TTG
ccccatgtcgactacatcga

SEQ ID NO: 25450 - DNA, 20 bp, Artificial Sequence
  Description of Artificial Sequence: Synthetic oligonucleotide
  Target: PCSK9; (+) strand; PAM type: YTN; PAM sequence: CTA
catcgaggaggactcctctg

SEQ ID NO: 25451 - DNA, 20 bp, Artificial Sequence
  Description of Artificial Sequence: Synthetic oligonucleotide
  Target: PCSK9; (+) strand; PAM type: YTN; PAM sequence: CTC
ctctgtctttgcccagagca

SEQ ID NO: 25452 - DNA, 20 bp, Artificial Sequence
  Description of Artificial Sequence: Synthetic oligonucleotide
  Target: PCSK9; (+) strand; PAM type: YTN; PAM sequence: CTC
tgtctttgcccagagcatcc

SEQ ID NO: 25453 - DNA, 20 bp, Artificial Sequence
  Description of Artificial Sequence: Synthetic oligonucleotide
  Target: PCSK9; (+) strand; PAM type: YTN; PAM sequence: CTG
tctttgcccagagcatcccg

SEQ ID NO: 25454 - DNA, 20 bp, Artificial Sequence
  Description of Artificial Sequence: Synthetic oligonucleotide
  Target: PCSK9; (+) strand; PAM type: YTN; PAM sequence: CTT
tgcccagagcatcccgtgga

SEQ ID NO: 25455 - DNA, 20 bp, Artificial Sequence
  Description of Artificial Sequence: Synthetic oligonucleotide
  Target: PCSK9; (+) strand; PAM type: YTN; PAM sequence: TTT
gcccagagcatcccgtggaa

SEQ ID NO: 25456 - DNA, 20 bp, Artificial Sequence
  Description of Artificial Sequence: Synthetic oligonucleotide
  Target: PCSK9; (+) strand; PAM type: YTN; PAM sequence: TTG
cccagagcatcccgtggaac

SEQ ID NO: 25457 - DNA, 20 bp, Artificial Sequence
  Description of Artificial Sequence: Synthetic oligonucleotide
  Target: PCSK9; (+) strand; PAM type: YTN; PAM sequence: CTG
gagcggattacccctccacg

SEQ ID NO: 25458 - DNA, 20 bp, Artificial Sequence
  Description of Artificial Sequence: Synthetic oligonucleotide
  Target: PCSK9; (+) strand; PAM type: YTN; PAM sequence: TTA
cccctccacggtaccgggcg

SEQ ID NO: 25459 - DNA, 20 bp, Artificial Sequence
  Description of Artificial Sequence: Synthetic oligonucleotide
  Target: PCSK9; (+) strand; PAM type: YTN; PAM sequence: CTC
cacggtaccgggcggatgaa

SEQ ID NO: 25460 - DNA, 20 bp, Artificial Sequence
  Description of Artificial Sequence: Synthetic oligonucleotide
  Target: PCSK9; (+) strand; PAM type: YTN; PAM sequence: CTG
tgccctgccccaccccatct

SEQ ID NO: 25461 - DNA, 20 bp, Artificial Sequence
  Description of Artificial Sequence: Synthetic oligonucleotide
  Target: PCSK9; (+) strand; PAM type: YTN; PAM sequence: CTG
ccccaccccatctgagctga

SEQ ID NO: 25462 - DNA, 20 bp, Artificial Sequence
  Description of Artificial Sequence: Synthetic oligonucleotide
  Target: PCSK9; (+) strand; PAM type: YTN; PAM sequence: CTG
agctgaatccatttgctctg

SEQ ID NO: 25463 - DNA, 20 bp, Artificial Sequence
  Description of Artificial Sequence: Synthetic oligonucleotide
  Target: PCSK9; (+) strand; PAM type: YTN; PAM sequence: CTG
aatccatttgctctgccctg

SEQ ID NO: 25464 - DNA, 20 bp, Artificial Sequence
  Description of Artificial Sequence: Synthetic oligonucleotide
  Target: PCSK9; (+) strand; PAM type: YTN; PAM sequence: TTT
gctctgccctggcctggcct

SEQ ID NO: 25465 - DNA, 20 bp, Artificial Sequence
  Description of Artificial Sequence: Synthetic oligonucleotide
  Target: PCSK9; (+) strand; PAM type: YTN; PAM sequence: TTG
ctctgccctggcctggcctc

SEQ ID NO: 25466 - DNA, 20 bp, Artificial Sequence
  Description of Artificial Sequence: Synthetic oligonucleotide
  Target: PCSK9; (+) strand; PAM type: YTN; PAM sequence: CTC
tgccctggcctggcctccct

SEQ ID NO: 25467 - DNA, 20 bp, Artificial Sequence
  Description of Artificial Sequence: Synthetic oligonucleotide
  Target: PCSK9; (+) strand; PAM type: YTN; PAM sequence: CTG
ccctggcctggcctccctgc

SEQ ID NO: 25468 - DNA, 20 bp, Artificial Sequence
  Description of Artificial Sequence: Synthetic oligonucleotide
  Target: PCSK9; (+) strand; PAM type: YTN; PAM sequence: CTG
gcctggcctccctgctggtg

SEQ ID NO: 25469 - DNA, 20 bp, Artificial Sequence
  Description of Artificial Sequence: Synthetic oligonucleotide
  Target: PCSK9; (+) strand; PAM type: YTN; PAM sequence: CTG
gcctccctgctggtggtttc

SEQ ID NO: 25470 - DNA, 20 bp, Artificial Sequence
  Description of Artificial Sequence: Synthetic oligonucleotide
  Target: PCSK9; (+) strand; PAM type: YTN; PAM sequence: CTC
cctgctggtggtttccactt

SEQ ID NO: 25471 - DNA, 20 bp, Artificial Sequence
  Description of Artificial Sequence: Synthetic oligonucleotide
  Target: PCSK9; (+) strand; PAM type: YTN; PAM sequence: CTG
ctggtggtttccacttctcg

SEQ ID NO: 25472 - DNA, 20 bp, Artificial Sequence
  Description of Artificial Sequence: Synthetic oligonucleotide
  Target: PCSK9; (+) strand; PAM type: YTN; PAM sequence: CTG
gtggtttccacttctcgggg

SEQ ID NO: 25473 - DNA, 20 bp, Artificial Sequence
  Description of Artificial Sequence: Synthetic oligonucleotide
  Target: PCSK9; (+) strand; PAM type: YTN; PAM sequence: TTT
ccacttctcggggggctttg

SEQ ID NO: 25474 - DNA, 20 bp, Artificial Sequence
  Description of Artificial Sequence: Synthetic oligonucleotide
  Target: PCSK9; (+) strand; PAM type: YTN; PAM sequence: TTC
cacttctcggggggctttgg

SEQ ID NO: 25475 - DNA, 20 bp, Artificial Sequence
  Description of Artificial Sequence: Synthetic oligonucleotide
  Target: PCSK9; (+) strand; PAM type: YTN; PAM sequence: CTT
ctcggggggctttgggactc

SEQ ID NO: 25476 - DNA, 20 bp, Artificial Sequence
  Description of Artificial Sequence: Synthetic oligonucleotide
  Target: PCSK9; (+) strand; PAM type: YTN; PAM sequence: TTC
tcggggggctttgggactca

SEQ ID NO: 25477 - DNA, 20 bp, Artificial Sequence
  Description of Artificial Sequence: Synthetic oligonucleotide
  Target: PCSK9; (+) strand; PAM type: YTN; PAM sequence: CTC
ggggggctttgggactcagc

SEQ ID NO: 25478 - DNA, 20 bp, Artificial Sequence
  Description of Artificial Sequence: Synthetic oligonucleotide
  Target: PCSK9; (+) strand; PAM type: YTN; PAM sequence: CTT
tgggactcagcacctccact

SEQ ID NO: 25479 - DNA, 20 bp, Artificial Sequence
  Description of Artificial Sequence: Synthetic oligonucleotide
  Target: PCSK9; (+) strand; PAM type: YTN; PAM sequence: TTT
gggactcagcacctccactg

SEQ ID NO: 25480 - DNA, 20 bp, Artificial Sequence
  Description of Artificial Sequence: Synthetic oligonucleotide
  Target: PCSK9; (+) strand; PAM type: YTN; PAM sequence: TTG
ggactcagcacctccactga

SEQ ID NO: 25481 - DNA, 20 bp, Artificial Sequence
  Description of Artificial Sequence: Synthetic oligonucleotide
  Target: PCSK9; (+) strand; PAM type: YTN; PAM sequence: CTC
agcacctccactgacccctt

SEQ ID NO: 25482 - DNA, 20 bp, Artificial Sequence
  Description of Artificial Sequence: Synthetic oligonucleotide
  Target: PCSK9; (+) strand; PAM type: YTN; PAM sequence: CTC
cactgacccctttttttctg

SEQ ID NO: 25483 - DNA, 20 bp, Artificial Sequence
  Description of Artificial Sequence: Synthetic oligonucleotide
  Target: PCSK9; (+) strand; PAM type: YTN; PAM sequence: CTG
acccctttttttctgtccca

SEQ ID NO: 25484 - DNA, 20 bp, Artificial Sequence
  Description of Artificial Sequence: Synthetic oligonucleotide
  Target: PCSK9; (+) strand; PAM type: YTN; PAM sequence: CTT
tttttctgtcccatccccat

SEQ ID NO: 25485 - DNA, 20 bp, Artificial Sequence
  Description of Artificial Sequence: Synthetic oligonucleotide
  Target: PCSK9; (+) strand; PAM type: YTN; PAM sequence: TTT
ttttctgtcccatccccatc

SEQ ID NO: 25486 - DNA, 20 bp, Artificial Sequence
  Description of Artificial Sequence: Synthetic oligonucleotide
  Target: PCSK9; (+) strand; PAM type: YTN; PAM sequence: TTT
tttctgtcccatccccatcc

SEQ ID NO: 25487 - DNA, 20 bp, Artificial Sequence
  Description of Artificial Sequence: Synthetic oligonucleotide
  Target: PCSK9; (+) strand; PAM type: YTN; PAM sequence: TTT
ttctgtcccatccccatccc

SEQ ID NO: 25488 - DNA, 20 bp, Artificial Sequence
  Description of Artificial Sequence: Synthetic oligonucleotide
  Target: PCSK9; (+) strand; PAM type: YTN; PAM sequence: TTT
tctgtcccatccccatcccc

SEQ ID NO: 25489 - DNA, 20 bp, Artificial Sequence
  Description of Artificial Sequence: Synthetic oligonucleotide
  Target: PCSK9; (+) strand; PAM type: YTN; PAM sequence: TTT
ctgtcccatccccatcccct

SEQ ID NO: 25490 - DNA, 20 bp, Artificial Sequence
  Description of Artificial Sequence: Synthetic oligonucleotide
  Target: PCSK9; (+) strand; PAM type: YTN; PAM sequence: TTC
tgtcccatccccatcccctg

SEQ ID NO: 25491 - DNA, 20 bp, Artificial Sequence
  Description of Artificial Sequence: Synthetic oligonucleotide
  Target: PCSK9; (+) strand; PAM type: YTN; PAM sequence: CTG
tcccatccccatcccctgca

SEQ ID NO: 25492 - DNA, 20 bp, Artificial Sequence
  Description of Artificial Sequence: Synthetic oligonucleotide
  Target: PCSK9; (+) strand; PAM type: YTN; PAM sequence: CTG
cagcccccactgcctgcctt

SEQ ID NO: 25493 - DNA, 20 bp, Artificial Sequence
  Description of Artificial Sequence: Synthetic oligonucleotide
  Target: PCSK9; (+) strand; PAM type: YTN; PAM sequence: CTG
cctgccttcctgttgcccca

SEQ ID NO: 25494 - DNA, 20 bp, Artificial Sequence
  Description of Artificial Sequence: Synthetic oligonucleotide
  Target: PCSK9; (+) strand; PAM type: YTN; PAM sequence: CTG
ccttcctgttgccccacaaa

SEQ ID NO: 25495 - DNA, 20 bp, Artificial Sequence
  Description of Artificial Sequence: Synthetic oligonucleotide
  Target: PCSK9; (+) strand; PAM type: YTN; PAM sequence: CTT
cctgttgccccacaaatgca

SEQ ID NO: 25496 - DNA, 20 bp, Artificial Sequence
  Description of Artificial Sequence: Synthetic oligonucleotide
  Target: PCSK9; (+) strand; PAM type: YTN; PAM sequence: TTC
ctgttgccccacaaatgcaa

SEQ ID NO: 25497 - DNA, 20 bp, Artificial Sequence
  Description of Artificial Sequence: Synthetic oligonucleotide
  Target: PCSK9; (+) strand; PAM type: YTN; PAM sequence: CTG
ttgccccacaaatgcaaaag

SEQ ID NO: 25498 - DNA, 20 bp, Artificial Sequence
  Description of Artificial Sequence: Synthetic oligonucleotide
  Target: PCSK9; (+) strand; PAM type: YTN; PAM sequence: TTG
ccccacaaatgcaaaagtct

SEQ ID NO: 25499 - DNA, 20 bp, Artificial Sequence
  Description of Artificial Sequence: Synthetic oligonucleotide
  Target: PCSK9; (+) strand; PAM type: YTN; PAM sequence: CTT
gccttaaatgatcctctttt

SEQ ID NO: 25500 - DNA, 20 bp, Artificial Sequence
  Description of Artificial Sequence: Synthetic oligonucleotide
  Target: PCSK9; (+) strand; PAM type: YTN; PAM sequence: TTG
ccttaaatgatcctcttttc

SEQ ID NO: 25501 - DNA, 20 bp, Artificial Sequence
  Description of Artificial Sequence: Synthetic oligonucleotide
  Target: PCSK9; (+) strand; PAM type: YTN; PAM sequence: CTT
aaatgatcctcttttccttc

SEQ ID NO: 25502 - DNA, 20 bp, Artificial Sequence
  Description of Artificial Sequence: Synthetic oligonucleotide
  Target: PCSK9; (+) strand; PAM type: YTN; PAM sequence: TTA
aatgatcctcttttccttct

SEQ ID NO: 25503 - DNA, 20 bp, Artificial Sequence
  Description of Artificial Sequence: Synthetic oligonucleotide
  Target: PCSK9; (+) strand; PAM type: YTN; PAM sequence: CTC
ttttccttcttttctcttgt

SEQ ID NO: 25504 - DNA, 20 bp, Artificial Sequence
  Description of Artificial Sequence: Synthetic oligonucleotide
  Target: PCSK9; (+) strand; PAM type: YTN; PAM sequence: CTT
ttccttcttttctcttgttt

SEQ ID NO: 25505 - DNA, 20 bp, Artificial Sequence
  Description of Artificial Sequence: Synthetic oligonucleotide
  Target: PCSK9; (+) strand; PAM type: YTN; PAM sequence: TTT
tccttcttttctcttgtttt

SEQ ID NO: 25506 - DNA, 20 bp, Artificial Sequence
  Description of Artificial Sequence: Synthetic oligonucleotide
  Target: PCSK9; (+) strand; PAM type: YTN; PAM sequence: TTT
ccttcttttctcttgttttc

SEQ ID NO: 25507 - DNA, 20 bp, Artificial Sequence
  Description of Artificial Sequence: Synthetic oligonucleotide
  Target: PCSK9; (+) strand; PAM type: YTN; PAM sequence: TTC
cttcttttctcttgttttcc

SEQ ID NO: 25508 - DNA, 20 bp, Artificial Sequence
  Description of Artificial Sequence: Synthetic oligonucleotide
  Target: PCSK9; (+) strand; PAM type: YTN; PAM sequence: CTT
cttttctcttgttttccttt

SEQ ID NO: 25509 - DNA, 20 bp, Artificial Sequence
  Description of Artificial Sequence: Synthetic oligonucleotide
  Target: PCSK9; (+) strand; PAM type: YTN; PAM sequence: TTC
ttttctcttgttttcctttt

SEQ ID NO: 25510 - DNA, 20 bp, Artificial Sequence
  Description of Artificial Sequence: Synthetic oligonucleotide
  Target: PCSK9; (+) strand; PAM type: YTN; PAM sequence: CTT
ttctcttgttttccttttct

SEQ ID NO: 25511 - DNA, 20 bp, Artificial Sequence
  Description of Artificial Sequence: Synthetic oligonucleotide
  Target: PCSK9; (+) strand; PAM type: YTN; PAM sequence: TTT
tctcttgttttccttttctc

SEQ ID NO: 25512 - DNA, 20 bp, Artificial Sequence
  Description of Artificial Sequence: Synthetic oligonucleotide
  Target: PCSK9; (+) strand; PAM type: YTN; PAM sequence: TTT
ctcttgttttccttttctca

SEQ ID NO: 25513 - DNA, 20 bp, Artificial Sequence
  Description of Artificial Sequence: Synthetic oligonucleotide
  Target: PCSK9; (+) strand; PAM type: YTN; PAM sequence: TTC
tcttgttttccttttctcac

SEQ ID NO: 25514 - DNA, 20 bp, Artificial Sequence
  Description of Artificial Sequence: Synthetic oligonucleotide
  Target: PCSK9; (+) strand; PAM type: YTN; PAM sequence: CTC
ttgttttccttttctcacca

SEQ ID NO: 25515 - DNA, 20 bp, Artificial Sequence
  Description of Artificial Sequence: Synthetic oligonucleotide
  Target: PCSK9; (+) strand; PAM type: YTN; PAM sequence: CTT
gttttccttttctcaccatt

SEQ ID NO: 25516 - DNA, 20 bp, Artificial Sequence
  Description of Artificial Sequence: Synthetic oligonucleotide
  Target: PCSK9; (+) strand; PAM type: YTN; PAM sequence: TTG
ttttccttttctcaccattt

SEQ ID NO: 25517 - DNA, 20 bp, Artificial Sequence
  Description of Artificial Sequence: Synthetic oligonucleotide
  Target: PCSK9; (+) strand; PAM type: YTN; PAM sequence: TTT
tccttttctcaccatttgga

SEQ ID NO: 25518 - DNA, 20 bp, Artificial Sequence
  Description of Artificial Sequence: Synthetic oligonucleotide
  Target: PCSK9; (+) strand; PAM type: YTN; PAM sequence: TTT
ccttttctcaccatttggaa

SEQ ID NO: 25519 - DNA, 20 bp, Artificial Sequence
  Description of Artificial Sequence: Synthetic oligonucleotide
  Target: PCSK9; (+) strand; PAM type: YTN; PAM sequence: TTC
cttttctcaccatttggaat

SEQ ID NO: 25520 - DNA, 20 bp, Artificial Sequence
  Description of Artificial Sequence: Synthetic oligonucleotide
  Target: PCSK9; (+) strand; PAM type: YTN; PAM sequence: CTT
ttctcaccatttggaatggc

SEQ ID NO: 25521 - DNA, 20 bp, Artificial Sequence
  Description of Artificial Sequence: Synthetic oligonucleotide
  Target: PCSK9; (+) strand; PAM type: YTN; PAM sequence: TTT
tctcaccatttggaatggcc

SEQ ID NO: 25522 - DNA, 20 bp, Artificial Sequence
  Description of Artificial Sequence: Synthetic oligonucleotide
  Target: PCSK9; (+) strand; PAM type: YTN; PAM sequence: TTT
ctcaccatttggaatggccc

SEQ ID NO: 25523 - DNA, 20 bp, Artificial Sequence
  Description of Artificial Sequence: Synthetic oligonucleotide
  Target: PCSK9; (+) strand; PAM type: YTN; PAM sequence: TTC
tcaccatttggaatggccca

SEQ ID NO: 25524 - DNA, 20 bp, Artificial Sequence
  Description of Artificial Sequence: Synthetic oligonucleotide
  Target: PCSK9; (+) strand; PAM type: YTN; PAM sequence: CTC
accatttggaatggcccagc

SEQ ID NO: 25525 - DNA, 20 bp, Artificial Sequence
  Description of Artificial Sequence: Synthetic oligonucleotide
  Target: PCSK9; (+) strand; PAM type: YTN; PAM sequence: TTT
ggaatggcccagcaggctgc

SEQ ID NO: 25526 - DNA, 20 bp, Artificial Sequence
  Description of Artificial Sequence: Synthetic oligonucleotide
  Target: PCSK9; (+) strand; PAM type: YTN; PAM sequence: TTG
gaatggcccagcaggctgca

SEQ ID NO: 25527 - DNA, 20 bp, Artificial Sequence
  Description of Artificial Sequence: Synthetic oligonucleotide
  Target: PCSK9; (+) strand; PAM type: YTN; PAM sequence: CTG
cacttaccttggaaggaggg

SEQ ID NO: 25528 - DNA, 20 bp, Artificial Sequence
  Description of Artificial Sequence: Synthetic oligonucleotide
  Target: PCSK9; (+) strand; PAM type: YTN; PAM sequence: CTT
accttggaaggagggttcat

SEQ ID NO: 25529 - DNA, 20 bp, Artificial Sequence
  Description of Artificial Sequence: Synthetic oligonucleotide
  Target: PCSK9; (+) strand; PAM type: YTN; PAM sequence: TTA
ccttggaaggagggttcatc

SEQ ID NO: 25530 - DNA, 20 bp, Artificial Sequence
  Description of Artificial Sequence: Synthetic oligonucleotide
  Target: PCSK9; (+) strand; PAM type: YTN; PAM sequence: CTT
ggaaggagggttcatctgat

SEQ ID NO: 25531 - DNA, 20 bp, Artificial Sequence
  Description of Artificial Sequence: Synthetic oligonucleotide
  Target: PCSK9; (+) strand; PAM type: YTN; PAM sequence: TTG
gaaggagggttcatctgatg

SEQ ID NO: 25532 - DNA, 20 bp, Artificial Sequence
  Description of Artificial Sequence: Synthetic oligonucleotide
  Target: PCSK9; (+) strand; PAM type: YTN; PAM sequence: TTC
atctgatggtgactctacct

SEQ ID NO: 25533 - DNA, 20 bp, Artificial Sequence
  Description of Artificial Sequence: Synthetic oligonucleotide
  Target: PCSK9; (+) strand; PAM type: YTN; PAM sequence: CTG
atggtgactctacctagggc

SEQ ID NO: 25534 - DNA, 20 bp, Artificial Sequence
  Description of Artificial Sequence: Synthetic oligonucleotide
  Target: PCSK9; (+) strand; PAM type: YTN; PAM sequence: CTC
tacctagggcccccaggcct

SEQ ID NO: 25535 - DNA, 20 bp, Artificial Sequence
  Description of Artificial Sequence: Synthetic oligonucleotide
  Target: PCSK9; (+) strand; PAM type: YTN; PAM sequence: CTA
cctagggcccccaggcctct

SEQ ID NO: 25536 - DNA, 20 bp, Artificial Sequence
  Description of Artificial Sequence: Synthetic oligonucleotide
  Target: PCSK9; (+) strand; PAM type: YTN; PAM sequence: CTA
gggcccccaggcctctataa

SEQ ID NO: 25537 - DNA, 20 bp, Artificial Sequence
  Description of Artificial Sequence: Synthetic oligonucleotide
  Target: PCSK9; (+) strand; PAM type: YTN; PAM sequence: CTC
tataactcccagtgccctgc

SEQ ID NO: 25538 - DNA, 20 bp, Artificial Sequence
  Description of Artificial Sequence: Synthetic oligonucleotide
  Target: PCSK9; (+) strand; PAM type: YTN; PAM sequence: CTA
taactcccagtgccctgcag

SEQ ID NO: 25539 - DNA, 20 bp, Artificial Sequence
  Description of Artificial Sequence: Synthetic oligonucleotide
  Target: PCSK9; (+) strand; PAM type: YTN; PAM sequence: CTC
ccagtgccctgcagactgga

SEQ ID NO: 25540 - DNA, 20 bp, Artificial Sequence
  Description of Artificial Sequence: Synthetic oligonucleotide
  Target: PCSK9; (+) strand; PAM type: YTN; PAM sequence: CTG
cagactggaccagatccttt

SEQ ID NO: 25541 - DNA, 20 bp, Artificial Sequence
  Description of Artificial Sequence: Synthetic oligonucleotide
  Target: PCSK9; (+) strand; PAM type: YTN; PAM sequence: CTG
gaccagatcctttaatggga

SEQ ID NO: 25542 - DNA, 20 bp, Artificial Sequence
  Description of Artificial Sequence: Synthetic oligonucleotide
  Target: PCSK9; (+) strand; PAM type: YTN; PAM sequence: CTT
taatgggatagacacaaccc

SEQ ID NO: 25543 - DNA, 20 bp, Artificial Sequence
  Description of Artificial Sequence: Synthetic oligonucleotide
  Target: PCSK9; (+) strand; PAM type: YTN; PAM sequence: TTT
aatgggatagacacaaccct

SEQ ID NO: 25544 - DNA, 20 bp, Artificial Sequence
  Description of Artificial Sequence: Synthetic oligonucleotide
  Target: PCSK9; (+) strand; PAM type: YTN; PAM sequence: TTA
atgggatagacacaaccctg

SEQ ID NO: 25545 - DNA, 20 bp, Artificial Sequence
  Description of Artificial Sequence: Synthetic oligonucleotide
  Target: PCSK9; (+) strand; PAM type: YTN; PAM sequence: CTG
tctgggatgcctctgcctac

SEQ ID NO: 25546 - DNA, 20 bp, Artificial Sequence
  Description of Artificial Sequence: Synthetic oligonucleotide
  Target: PCSK9; (+) strand; PAM type: YTN; PAM sequence: CTG
ggatgcctctgcctaccttc

SEQ ID NO: 25547 - DNA, 20 bp, Artificial Sequence
  Description of Artificial Sequence: Synthetic oligonucleotide
  Target: PCSK9; (+) strand; PAM type: YTN; PAM sequence: CTC
tgcctaccttcctgttttgc

SEQ ID NO: 25548 - DNA, 20 bp, Artificial Sequence
  Description of Artificial Sequence: Synthetic oligonucleotide
  Target: PCSK9; (+) strand; PAM type: YTN; PAM sequence: CTG
cctaccttcctgttttgctg

SEQ ID NO: 25549 - DNA, 20 bp, Artificial Sequence
  Description of Artificial Sequence: Synthetic oligonucleotide
  Target: PCSK9; (+) strand; PAM type: YTN; PAM sequence: CTA
ccttcctgttttgctgctcc

SEQ ID NO: 25550 - DNA, 20 bp, Artificial Sequence
  Description of Artificial Sequence: Synthetic oligonucleotide
  Target: PCSK9; (+) strand; PAM type: YTN; PAM sequence: CTT
cctgttttgctgctccacct

SEQ ID NO: 25551 - DNA, 20 bp, Artificial Sequence
  Description of Artificial Sequence: Synthetic oligonucleotide
  Target: PCSK9; (+) strand; PAM type: YTN; PAM sequence: TTC
ctgttttgctgctccacctg

SEQ ID NO: 25552 - DNA, 20 bp, Artificial Sequence
  Description of Artificial Sequence: Synthetic oligonucleotide
  Target: PCSK9; (+) strand; PAM type: YTN; PAM sequence: CTG
ttttgctgctccacctgcct

SEQ ID NO: 25553 - DNA, 20 bp, Artificial Sequence
  Description of Artificial Sequence: Synthetic oligonucleotide
  Target: PCSK9; (+) strand; PAM type: YTN; PAM sequence: TTT
tgctgctccacctgcctcca

SEQ ID NO: 25554 - DNA, 20 bp, Artificial Sequence
  Description of Artificial Sequence: Synthetic oligonucleotide
  Target: PCSK9; (+) strand; PAM type: YTN; PAM sequence: TTT
gctgctccacctgcctccag

SEQ ID NO: 25555 - DNA, 20 bp, Artificial Sequence
  Description of Artificial Sequence: Synthetic oligonucleotide
  Target: PCSK9; (+) strand; PAM type: YTN; PAM sequence: TTG
ctgctccacctgcctccagc

SEQ ID NO: 25556 - DNA, 20 bp, Artificial Sequence
  Description of Artificial Sequence: Synthetic oligonucleotide
  Target: PCSK9; (+) strand; PAM type: YTN; PAM sequence: CTG
ctccacctgcctccagctcc

SEQ ID NO: 25557 - DNA, 20 bp, Artificial Sequence
  Description of Artificial Sequence: Synthetic oligonucleotide
  Target: PCSK9; (+) strand; PAM type: YTN; PAM sequence: CTC
cacctgcctccagctccgtt

SEQ ID NO: 25558 - DNA, 20 bp, Artificial Sequence
  Description of Artificial Sequence: Synthetic oligonucleotide
  Target: PCSK9; (+) strand; PAM type: YTN; PAM sequence: CTG
cctccagctccgtttggctt

SEQ ID NO: 25559 - DNA, 20 bp, Artificial Sequence
  Description of Artificial Sequence: Synthetic oligonucleotide
  Target: PCSK9; (+) strand; PAM type: YTN; PAM sequence: CTC
cagctccgtttggcttcctg

SEQ ID NO: 25560 - DNA, 20 bp, Artificial Sequence
  Description of Artificial Sequence: Synthetic oligonucleotide
  Target: PCSK9; (+) strand; PAM type: YTN; PAM sequence: CTC
cgtttggcttcctggggctc

SEQ ID NO: 25561 - DNA, 20 bp, Artificial Sequence
  Description of Artificial Sequence: Synthetic oligonucleotide
  Target: PCSK9; (+) strand; PAM type: YTN; PAM sequence: TTT
ggcttcctggggctccctgc

SEQ ID NO: 25562 - DNA, 20 bp, Artificial Sequence
  Description of Artificial Sequence: Synthetic oligonucleotide
  Target: PCSK9; (+) strand; PAM type: YTN; PAM sequence: TTG
gcttcctggggctccctgcc

SEQ ID NO: 25563 - DNA, 20 bp, Artificial Sequence
  Description of Artificial Sequence: Synthetic oligonucleotide
  Target: PCSK9; (+) strand; PAM type: YTN; PAM sequence: CTT
cctggggctccctgcctggg

SEQ ID NO: 25564 - DNA, 20 bp, Artificial Sequence
  Description of Artificial Sequence: Synthetic oligonucleotide
  Target: PCSK9; (+) strand; PAM type: YTN; PAM sequence: TTC
ctggggctccctgcctgggc

SEQ ID NO: 25565 - DNA, 20 bp, Artificial Sequence
  Description of Artificial Sequence: Synthetic oligonucleotide
  Target: PCSK9; (+) strand; PAM type: YTN; PAM sequence: CTG
gggctccctgcctgggccac

SEQ ID NO: 25566 - DNA, 20 bp, Artificial Sequence
  Description of Artificial Sequence: Synthetic oligonucleotide
  Target: PCSK9; (+) strand; PAM type: YTN; PAM sequence: CTC
cctgcctgggccactttgtg

SEQ ID NO: 25567 - DNA, 20 bp, Artificial Sequence
  Description of Artificial Sequence: Synthetic oligonucleotide
  Target: PCSK9; (+) strand; PAM type: YTN; PAM sequence: CTG
cctgggccactttgtgtctt

SEQ ID NO: 25568 - DNA, 20 bp, Artificial Sequence
  Description of Artificial Sequence: Synthetic oligonucleotide
  Target: PCSK9; (+) strand; PAM type: YTN; PAM sequence: CTG
ggccactttgtgtcttccct

SEQ ID NO: 25569 - DNA, 20 bp, Artificial Sequence
  Description of Artificial Sequence: Synthetic oligonucleotide
  Target: PCSK9; (+) strand; PAM type: YTN; PAM sequence: CTT
tgtgtcttccctctaggcct

SEQ ID NO: 25570 - DNA, 20 bp, Artificial Sequence
  Description of Artificial Sequence: Synthetic oligonucleotide
  Target: PCSK9; (+) strand; PAM type: YTN; PAM sequence: TTT
gtgtcttccctctaggcctt

SEQ ID NO: 25571 - DNA, 20 bp, Artificial Sequence
  Description of Artificial Sequence: Synthetic oligonucleotide
  Target: PCSK9; (+) strand; PAM type: YTN; PAM sequence: TTG
tgtcttccctctaggccttt

SEQ ID NO: 25572 - DNA, 20 bp, Artificial Sequence
  Description of Artificial Sequence: Synthetic oligonucleotide
  Target: PCSK9; (+) strand; PAM type: YTN; PAM sequence: CTT
ccctctaggcctttctttcc

SEQ ID NO: 25573 - DNA, 20 bp, Artificial Sequence
  Description of Artificial Sequence: Synthetic oligonucleotide
  Target: PCSK9; (+) strand; PAM type: YTN; PAM sequence: TTC
cctctaggcctttctttcca

SEQ ID NO: 25574 - DNA, 20 bp, Artificial Sequence
  Description of Artificial Sequence: Synthetic oligonucleotide
  Target: PCSK9; (+) strand; PAM type: YTN; PAM sequence: CTC
taggcctttctttccactgt

SEQ ID NO: 25575 - DNA, 20 bp, Artificial Sequence
  Description of Artificial Sequence: Synthetic oligonucleotide
  Target: PCSK9; (+) strand; PAM type: YTN; PAM sequence: CTA
ggcctttctttccactgttc

SEQ ID NO: 25576 - DNA, 20 bp, Artificial Sequence
  Description of Artificial Sequence: Synthetic oligonucleotide
  Target: PCSK9; (+) strand; PAM type: YTN; PAM sequence: CTT
tctttccactgttccctctg

SEQ ID NO: 25577 - DNA, 20 bp, Artificial Sequence
  Description of Artificial Sequence: Synthetic oligonucleotide
  Target: PCSK9; (+) strand; PAM type: YTN; PAM sequence: TTT
ctttccactgttccctctgc

SEQ ID NO: 25578 - DNA, 20 bp, Artificial Sequence
  Description of Artificial Sequence: Synthetic oligonucleotide
  Target: PCSK9; (+) strand; PAM type: YTN; PAM sequence: TTC
tttccactgttccctctgcc

SEQ ID NO: 25579 - DNA, 20 bp, Artificial Sequence
  Description of Artificial Sequence: Synthetic oligonucleotide
  Target: PCSK9; (+) strand; PAM type: YTN; PAM sequence: CTT
tccactgttccctctgcctg

SEQ ID NO: 25580 - DNA, 20 bp, Artificial Sequence
  Description of Artificial Sequence: Synthetic oligonucleotide
  Target: PCSK9; (+) strand; PAM type: YTN; PAM sequence: TTT
ccactgttccctctgcctgg

SEQ ID NO: 25581 - DNA, 20 bp, Artificial Sequence
  Description of Artificial Sequence: Synthetic oligonucleotide
  Target: PCSK9; (+) strand; PAM type: YTN; PAM sequence: TTC
cactgttccctctgcctggt

SEQ ID NO: 25582 - DNA, 20 bp, Artificial Sequence
  Description of Artificial Sequence: Synthetic oligonucleotide
  Target: PCSK9; (+) strand; PAM type: YTN; PAM sequence: CTG
ttccctctgcctggtgtggc

SEQ ID NO: 25583 - DNA, 20 bp, Artificial Sequence
  Description of Artificial Sequence: Synthetic oligonucleotide
  Target: PCSK9; (+) strand; PAM type: YTN; PAM sequence: TTC
cctctgcctggtgtggcctg

SEQ ID NO: 25584 - DNA, 20 bp, Artificial Sequence
  Description of Artificial Sequence: Synthetic oligonucleotide
  Target: PCSK9; (+) strand; PAM type: YTN; PAM sequence: CTC
tgcctggtgtggcctggcta

SEQ ID NO: 25585 - DNA, 20 bp, Artificial Sequence
  Description of Artificial Sequence: Synthetic oligonucleotide
  Target: PCSK9; (+) strand; PAM type: YTN; PAM sequence: CTG
cctggtgtggcctggctatg

SEQ ID NO: 25586 - DNA, 20 bp, Artificial Sequence
  Description of Artificial Sequence: Synthetic oligonucleotide
  Target: PCSK9; (+) strand; PAM type: YTN; PAM sequence: CTG
gtgtggcctggctatggaag

SEQ ID NO: 25587 - DNA, 20 bp, Artificial Sequence
  Description of Artificial Sequence: Synthetic oligonucleotide
  Target: PCSK9; (+) strand; PAM type: YTN; PAM sequence: CTG
gctatggaagggagggagga

SEQ ID NO: 25588 - DNA, 20 bp, Artificial Sequence
  Description of Artificial Sequence: Synthetic oligonucleotide
  Target: PCSK9; (+) strand; PAM type: YTN; PAM sequence: CTA
tggaagggagggaggaggag

SEQ ID NO: 25589 - DNA, 20 bp, Artificial Sequence
  Description of Artificial Sequence: Synthetic oligonucleotide
  Target: PCSK9; (+) strand; PAM type: YTN; PAM sequence: CTG
cattctagcagggacttgca

SEQ ID NO: 25590 - DNA, 20 bp, Artificial Sequence
  Description of Artificial Sequence: Synthetic oligonucleotide
  Target: PCSK9; (+) strand; PAM type: YTN; PAM sequence: TTC
tagcagggacttgcaggtgg

SEQ ID NO: 25591 - DNA, 20 bp, Artificial Sequence
  Description of Artificial Sequence: Synthetic oligonucleotide
  Target: PCSK9; (+) strand; PAM type: YTN; PAM sequence: CTA
gcagggacttgcaggtggca

SEQ ID NO: 25592 - DNA, 20 bp, Artificial Sequence
  Description of Artificial Sequence: Synthetic oligonucleotide
  Target: PCSK9; (+) strand; PAM type: YTN; PAM sequence: CTT
gcaggtggcaattcagtcgg

SEQ ID NO: 25593 - DNA, 20 bp, Artificial Sequence
  Description of Artificial Sequence: Synthetic oligonucleotide
  Target: PCSK9; (+) strand; PAM type: YTN; PAM sequence: TTG
caggtggcaattcagtcggg

SEQ ID NO: 25594 - DNA, 20 bp, Artificial Sequence
  Description of Artificial Sequence: Synthetic oligonucleotide
  Target: PCSK9; (+) strand; PAM type: YTN; PAM sequence: TTC
agtcggggaagactctagat

SEQ ID NO: 25595 - DNA, 20 bp, Artificial Sequence
  Description of Artificial Sequence: Synthetic oligonucleotide
  Target: PCSK9; (+) strand; PAM type: YTN; PAM sequence: CTC
tagatgcacctggcctgagg

SEQ ID NO: 25596 - DNA, 20 bp, Artificial Sequence
  Description of Artificial Sequence: Synthetic oligonucleotide
  Target: PCSK9; (+) strand; PAM type: YTN; PAM sequence: CTA
gatgcacctggcctgaggag

SEQ ID NO: 25597 - DNA, 20 bp, Artificial Sequence
  Description of Artificial Sequence: Synthetic oligonucleotide
  Target: PCSK9; (+) strand; PAM type: YTN; PAM sequence: CTG
gcctgaggagagaatgaagg

SEQ ID NO: 25598 - DNA, 20 bp, Artificial Sequence
  Description of Artificial Sequence: Synthetic oligonucleotide
  Target: PCSK9; (+) strand; PAM type: YTN; PAM sequence: CTG
aggagagaatgaagggttct

SEQ ID NO: 25599 - DNA, 20 bp, Artificial Sequence
  Description of Artificial Sequence: Synthetic oligonucleotide
  Target: PCSK9; (+) strand; PAM type: YTN; PAM sequence: TTC
tagttggactgtgttaagtt

SEQ ID NO: 25600 - DNA, 20 bp, Artificial Sequence
  Description of Artificial Sequence: Synthetic oligonucleotide
  Target: PCSK9; (+) strand; PAM type: YTN; PAM sequence: CTA
gttggactgtgttaagtttg

SEQ ID NO: 25601 - DNA, 20 bp, Artificial Sequence
  Description of Artificial Sequence: Synthetic oligonucleotide
  Target: PCSK9; (+) strand; PAM type: YTN; PAM sequence: TTG
gactgtgttaagtttgaggt

SEQ ID NO: 25602 - DNA, 20 bp, Artificial Sequence
  Description of Artificial Sequence: Synthetic oligonucleotide
  Target: PCSK9; (+) strand; PAM type: YTN; PAM sequence: CTG
tgttaagtttgaggtgccca

SEQ ID NO: 25603 - DNA, 20 bp, Artificial Sequence
  Description of Artificial Sequence: Synthetic oligonucleotide
  Target: PCSK9; (+) strand; PAM type: YTN; PAM sequence: TTA
agtttgaggtgcccatggtg

SEQ ID NO: 25604 - DNA, 20 bp, Artificial Sequence
  Description of Artificial Sequence: Synthetic oligonucleotide
  Target: PCSK9; (+) strand; PAM type: YTN; PAM sequence: TTT
gaggtgcccatggtgtgagg

SEQ ID NO: 25605 - DNA, 20 bp, Artificial Sequence
  Description of Artificial Sequence: Synthetic oligonucleotide
  Target: PCSK9; (+) strand; PAM type: YTN; PAM sequence: TTG
aggtgcccatggtgtgaggt

SEQ ID NO: 25606 - DNA, 20 bp, Artificial Sequence
  Description of Artificial Sequence: Synthetic oligonucleotide
  Target: PCSK9; (+) strand; PAM type: YTN; PAM sequence: CTG
gagctcagcgcagagatgat

SEQ ID NO: 25607 - DNA, 20 bp, Artificial Sequence
  Description of Artificial Sequence: Synthetic oligonucleotide
  Target: PCSK9; (+) strand; PAM type: YTN; PAM sequence: CTC
agcgcagagatgatgcaatg

SEQ ID NO: 25608 - DNA, 20 bp, Artificial Sequence
  Description of Artificial Sequence: Synthetic oligonucleotide
  Target: PCSK9; (+) strand; PAM type: YTN; PAM sequence: CTT
ggggtgaactcagctttcac

SEQ ID NO: 25609 - DNA, 20 bp, Artificial Sequence
  Description of Artificial Sequence: Synthetic oligonucleotide
  Target: PCSK9; (+) strand; PAM type: YTN; PAM sequence: TTG
gggtgaactcagctttcacc

SEQ ID NO: 25610 - DNA, 20 bp, Artificial Sequence
  Description of Artificial Sequence: Synthetic oligonucleotide
  Target: PCSK9; (+) strand; PAM type: YTN; PAM sequence: CTC
agctttcaccccttaccggt

SEQ ID NO: 25611 - DNA, 20 bp, Artificial Sequence
  Description of Artificial Sequence: Synthetic oligonucleotide
  Target: PCSK9; (+) strand; PAM type: YTN; PAM sequence: CTT
tcaccccttaccggttctcg

SEQ ID NO: 25612 - DNA, 20 bp, Artificial Sequence
  Description of Artificial Sequence: Synthetic oligonucleotide
  Target: PCSK9; (+) strand; PAM type: YTN; PAM sequence: TTT
caccccttaccggttctcgt

SEQ ID NO: 25613 - DNA, 20 bp, Artificial Sequence
  Description of Artificial Sequence: Synthetic oligonucleotide
  Target: PCSK9; (+) strand; PAM type: YTN; PAM sequence: TTC
accccttaccggttctcgtg

SEQ ID NO: 25614 - DNA, 20 bp, Artificial Sequence
  Description of Artificial Sequence: Synthetic oligonucleotide
  Target: PCSK9; (+) strand; PAM type: YTN; PAM sequence: CTT
accggttctcgtgggatctt

SEQ ID NO: 25615 - DNA, 20 bp, Artificial Sequence
  Description of Artificial Sequence: Synthetic oligonucleotide
  Target: PCSK9; (+) strand; PAM type: YTN; PAM sequence: TTA
ccggttctcgtgggatcttg

SEQ ID NO: 25616 - DNA, 20 bp, Artificial Sequence
  Description of Artificial Sequence: Synthetic oligonucleotide
  Target: PCSK9; (+) strand; PAM type: YTN; PAM sequence: TTC
tcgtgggatcttgggaagcc

SEQ ID NO: 25617 - DNA, 20 bp, Artificial Sequence
  Description of Artificial Sequence: Synthetic oligonucleotide
  Target: PCSK9; (+) strand; PAM type: YTN; PAM sequence: CTC
gtgggatcttgggaagccac

SEQ ID NO: 25618 - DNA, 20 bp, Artificial Sequence
  Description of Artificial Sequence: Synthetic oligonucleotide
  Target: PCSK9; (+) strand; PAM type: YTN; PAM sequence: CTT
gggaagccactttcttctat

SEQ ID NO: 25619 - DNA, 20 bp, Artificial Sequence
  Description of Artificial Sequence: Synthetic oligonucleotide
  Target: PCSK9; (+) strand; PAM type: YTN; PAM sequence: TTG
ggaagccactttcttctatg

SEQ ID NO: 25620 - DNA, 20 bp, Artificial Sequence
  Description of Artificial Sequence: Synthetic oligonucleotide
  Target: PCSK9; (+) strand; PAM type: YTN; PAM sequence: CTT
tcttctatgagctttgtcgt

SEQ ID NO: 25621 - DNA, 20 bp, Artificial Sequence
  Description of Artificial Sequence: Synthetic oligonucleotide
  Target: PCSK9; (+) strand; PAM type: YTN; PAM sequence: TTT
cttctatgagctttgtcgtt

SEQ ID NO: 25622 - DNA, 20 bp, Artificial Sequence
  Description of Artificial Sequence: Synthetic oligonucleotide
  Target: PCSK9; (+) strand; PAM type: YTN; PAM sequence: TTC
ttctatgagctttgtcgttc

SEQ ID NO: 25623 - DNA, 20 bp, Artificial Sequence
  Description of Artificial Sequence: Synthetic oligonucleotide
  Target: PCSK9; (+) strand; PAM type: YTN; PAM sequence: CTT
ctatgagctttgtcgttctt

SEQ ID NO: 25624 - DNA, 20 bp, Artificial Sequence
  Description of Artificial Sequence: Synthetic oligonucleotide
  Target: PCSK9; (+) strand; PAM type: YTN; PAM sequence: TTC
tatgagctttgtcgttcttg

SEQ ID NO: 25625 - DNA, 20 bp, Artificial Sequence
  Description of Artificial Sequence: Synthetic oligonucleotide
  Target: PCSK9; (+) strand; PAM type: YTN; PAM sequence: CTA
tgagctttgtcgttcttgtc

SEQ ID NO: 25626 - DNA, 20 bp, Artificial Sequence
  Description of Artificial Sequence: Synthetic oligonucleotide
  Target: PCSK9; (+) strand; PAM type: YTN; PAM sequence: CTT
tgtcgttcttgtctgtaaaa

SEQ ID NO: 25627 - DNA, 20 bp, Artificial Sequence
  Description of Artificial Sequence: Synthetic oligonucleotide
  Target: PCSK9; (+) strand; PAM type: YTN; PAM sequence: TTT
gtcgttcttgtctgtaaaat

SEQ ID NO: 25628 - DNA, 20 bp, Artificial Sequence
  Description of Artificial Sequence: Synthetic oligonucleotide
  Target: PCSK9; (+) strand; PAM type: YTN; PAM sequence: TTG
tcgttcttgtctgtaaaatg

SEQ ID NO: 25629 - DNA, 20 bp, Artificial Sequence
  Description of Artificial Sequence: Synthetic oligonucleotide
  Target: PCSK9; (+) strand; PAM type: YTN; PAM sequence: TTC
ttgtctgtaaaatgggcaca

SEQ ID NO: 25630 - DNA, 20 bp, Artificial Sequence
  Description of Artificial Sequence: Synthetic oligonucleotide
  Target: PCSK9; (+) strand; PAM type: YTN; PAM sequence: CTT
gtctgtaaaatgggcacata

SEQ ID NO: 25631 - DNA, 20 bp, Artificial Sequence
  Description of Artificial Sequence: Synthetic oligonucleotide
  Target: PCSK9; (+) strand; PAM type: YTN; PAM sequence: TTG
tctgtaaaatgggcacataa

SEQ ID NO: 25632 - DNA, 20 bp, Artificial Sequence
  Description of Artificial Sequence: Synthetic oligonucleotide
  Target: PCSK9; (+) strand; PAM type: YTN; PAM sequence: CTG
taaaatgggcacataaccct

SEQ ID NO: 25633 - DNA, 20 bp, Artificial Sequence
  Description of Artificial Sequence: Synthetic oligonucleotide
  Target: PCSK9; (+) strand; PAM type: YTN; PAM sequence: CTG
tccctgtccttctcacaggt

SEQ ID NO: 25634 - DNA, 20 bp, Artificial Sequence
  Description of Artificial Sequence: Synthetic oligonucleotide
  Target: PCSK9; (+) strand; PAM type: YTN; PAM sequence: CTG
tccttctcacaggttgctgt

SEQ ID NO: 25635 - DNA, 20 bp, Artificial Sequence
  Description of Artificial Sequence: Synthetic oligonucleotide
  Target: PCSK9; (+) strand; PAM type: YTN; PAM sequence: CTT
ctcacaggttgctgtgagac

SEQ ID NO: 25636 - DNA, 20 bp, Artificial Sequence
  Description of Artificial Sequence: Synthetic oligonucleotide
  Target: PCSK9; (+) strand; PAM type: YTN; PAM sequence: TTC
tcacaggttgctgtgagact

SEQ ID NO: 25637 - DNA, 20 bp, Artificial Sequence
  Description of Artificial Sequence: Synthetic oligonucleotide
  Target: PCSK9; (+) strand; PAM type: YTN; PAM sequence: CTC
acaggttgctgtgagactcc

SEQ ID NO: 25638 - DNA, 20 bp, Artificial Sequence
  Description of Artificial Sequence: Synthetic oligonucleotide
  Target: PCSK9; (+) strand; PAM type: YTN; PAM sequence: TTG
ctgtgagactccaatgagtt

SEQ ID NO: 25639 - DNA, 20 bp, Artificial Sequence
  Description of Artificial Sequence: Synthetic oligonucleotide
  Target: PCSK9; (+) strand; PAM type: YTN; PAM sequence: CTG
tgagactccaatgagttgaa

SEQ ID NO: 25640 - DNA, 20 bp, Artificial Sequence
  Description of Artificial Sequence: Synthetic oligonucleotide
  Target: PCSK9; (+) strand; PAM type: YTN; PAM sequence: CTC
caatgagttgaaggatgtgc

SEQ ID NO: 25641 - DNA, 20 bp, Artificial Sequence
  Description of Artificial Sequence: Synthetic oligonucleotide
  Target: PCSK9; (+) strand; PAM type: YTN; PAM sequence: TTG
aaggatgtgcagatgctttt

SEQ ID NO: 25642 - DNA, 20 bp, Artificial Sequence
  Description of Artificial Sequence: Synthetic oligonucleotide
  Target: PCSK9; (+) strand; PAM type: YTN; PAM sequence: CTT
ttggaagtgaaaagttgggg

SEQ ID NO: 25643 - DNA, 20 bp, Artificial Sequence
  Description of Artificial Sequence: Synthetic oligonucleotide
  Target: PCSK9; (+) strand; PAM type: YTN; PAM sequence: TTT
tggaagtgaaaagttggggg

SEQ ID NO: 25644 - DNA, 20 bp, Artificial Sequence
  Description of Artificial Sequence: Synthetic oligonucleotide
  Target: PCSK9; (+) strand; PAM type: YTN; PAM sequence: TTT
ggaagtgaaaagttgggggg

SEQ ID NO: 25645 - DNA, 20 bp, Artificial Sequence
  Description of Artificial Sequence: Synthetic oligonucleotide
  Target: PCSK9; (+) strand; PAM type: YTN; PAM sequence: TTG
gaagtgaaaagttggggggc

SEQ ID NO: 25646 - DNA, 20 bp, Artificial Sequence
  Description of Artificial Sequence: Synthetic oligonucleotide
  Target: PCSK9; (+) strand; PAM type: YTN; PAM sequence: TTG
gggggctactgtgtgacttt

SEQ ID NO: 25647 - DNA, 20 bp, Artificial Sequence
  Description of Artificial Sequence: Synthetic oligonucleotide
  Target: PCSK9; (+) strand; PAM type: YTN; PAM sequence: CTA
ctgtgtgactttgcatacac

SEQ ID NO: 25648 - DNA, 20 bp, Artificial Sequence
  Description of Artificial Sequence: Synthetic oligonucleotide
  Target: PCSK9; (+) strand; PAM type: YTN; PAM sequence: CTG
tgtgactttgcatacaccca

SEQ ID NO: 25649 - DNA, 20 bp, Artificial Sequence
  Description of Artificial Sequence: Synthetic oligonucleotide
  Target: PCSK9; (+) strand; PAM type: YTN; PAM sequence: CTT
tgcatacacccaaactgtgt

SEQ ID NO: 25650 - DNA, 20 bp, Artificial Sequence
  Description of Artificial Sequence: Synthetic oligonucleotide
  Target: PCSK9; (+) strand; PAM type: YTN; PAM sequence: TTT
gcatacacccaaactgtgtg

SEQ ID NO: 25651 - DNA, 20 bp, Artificial Sequence
  Description of Artificial Sequence: Synthetic oligonucleotide
  Target: PCSK9; (+) strand; PAM type: YTN; PAM sequence: TTG
catacacccaaactgtgtga

SEQ ID NO: 25652 - DNA, 20 bp, Artificial Sequence
  Description of Artificial Sequence: Synthetic oligonucleotide
  Target: PCSK9; (+) strand; PAM type: YTN; PAM sequence: CTG
tgtgaccttgcatatgtctg

SEQ ID NO: 25653 - DNA, 20 bp, Artificial Sequence
  Description of Artificial Sequence: Synthetic oligonucleotide
  Target: PCSK9; (+) strand; PAM type: YTN; PAM sequence: CTT
gcatatgtctgagttgctgc

SEQ ID NO: 25654 - DNA, 20 bp, Artificial Sequence
  Description of Artificial Sequence: Synthetic oligonucleotide
  Target: PCSK9; (+) strand; PAM type: YTN; PAM sequence: TTG
catatgtctgagttgctgcc

SEQ ID NO: 25655 - DNA, 20 bp, Artificial Sequence
  Description of Artificial Sequence: Synthetic oligonucleotide
  Target: PCSK9; (+) strand; PAM type: YTN; PAM sequence: CTG
agttgctgccattgcaacag

SEQ ID NO: 25656 - DNA, 20 bp, Artificial Sequence
  Description of Artificial Sequence: Synthetic oligonucleotide
  Target: PCSK9; (+) strand; PAM type: YTN; PAM sequence: TTG
ctgccattgcaacagatcag

SEQ ID NO: 25657 - DNA, 20 bp, Artificial Sequence
  Description of Artificial Sequence: Synthetic oligonucleotide
  Target: PCSK9; (+) strand; PAM type: YTN; PAM sequence: CTG
ccattgcaacagatcagagc

SEQ ID NO: 25658 - DNA, 20 bp, Artificial Sequence
  Description of Artificial Sequence: Synthetic oligonucleotide
  Target: PCSK9; (+) strand; PAM type: YTN; PAM sequence: TTG
caacagatcagagctggtgg

SEQ ID NO: 25659 - DNA, 20 bp, Artificial Sequence
  Description of Artificial Sequence: Synthetic oligonucleotide
  Target: PCSK9; (+) strand; PAM type: YTN; PAM sequence: CTG
gtgggctgggtgtggagaaa

SEQ ID NO: 25660 - DNA, 20 bp, Artificial Sequence
  Description of Artificial Sequence: Synthetic oligonucleotide
  Target: PCSK9; (+) strand; PAM type: YTN; PAM sequence: CTG
ggtgtggagaaagggtttgt

SEQ ID NO: 25661 - DNA, 20 bp, Artificial Sequence
  Description of Artificial Sequence: Synthetic oligonucleotide
  Target: PCSK9; (+) strand; PAM type: YTN; PAM sequence: TTT
gtgtgggggacatcctctgg

SEQ ID NO: 25662 - DNA, 20 bp, Artificial Sequence
  Description of Artificial Sequence: Synthetic oligonucleotide
  Target: PCSK9; (+) strand; PAM type: YTN; PAM sequence: TTG
tgtgggggacatcctctggc

SEQ ID NO: 25663 - DNA, 20 bp, Artificial Sequence
  Description of Artificial Sequence: Synthetic oligonucleotide
  Target: PCSK9; (+) strand; PAM type: YTN; PAM sequence: CTC
tggcaagggtggcagcagca

SEQ ID NO: 25664 - DNA, 20 bp, Artificial Sequence
  Description of Artificial Sequence: Synthetic oligonucleotide
  Target: PCSK9; (+) strand; PAM type: YTN; PAM sequence: CTG
gcaagggtggcagcagcaga

SEQ ID NO: 25665 - DNA, 20 bp, Artificial Sequence
  Description of Artificial Sequence: Synthetic oligonucleotide
  Target: PCSK9; (+) strand; PAM type: YTN; PAM sequence: CTG
gtcggtcatgtgtgctgacc

SEQ ID NO: 25666 - DNA, 20 bp, Artificial Sequence
  Description of Artificial Sequence: Synthetic oligonucleotide
  Target: PCSK9; (+) strand; PAM type: YTN; PAM sequence: CTG
acccggcctgggcagcctgt

SEQ ID NO: 25667 - DNA, 20 bp, Artificial Sequence
  Description of Artificial Sequence: Synthetic oligonucleotide
  Target: PCSK9; (+) strand; PAM type: YTN; PAM sequence: CTG
ggcagcctgtggccagggag

SEQ ID NO: 25668 - DNA, 20 bp, Artificial Sequence
  Description of Artificial Sequence: Synthetic oligonucleotide
  Target: PCSK9; (+) strand; PAM type: YTN; PAM sequence: CTG
tggccagggagaggacagct

SEQ ID NO: 25669 - DNA, 20 bp, Artificial Sequence
  Description of Artificial Sequence: Synthetic oligonucleotide
  Target: PCSK9; (+) strand; PAM type: YTN; PAM sequence: CTC
ctctgtaggaagagcctgtt

SEQ ID NO: 25670 - DNA, 20 bp, Artificial Sequence
  Description of Artificial Sequence: Synthetic oligonucleotide
  Target: PCSK9; (+) strand; PAM type: YTN; PAM sequence: CTC
tgtaggaagagcctgttcct

SEQ ID NO: 25671 - DNA, 20 bp, Artificial Sequence
  Description of Artificial Sequence: Synthetic oligonucleotide
  Target: PCSK9; (+) strand; PAM type: YTN; PAM sequence: CTG
taggaagagcctgttccttt

SEQ ID NO: 25672 - DNA, 20 bp, Artificial Sequence
  Description of Artificial Sequence: Synthetic oligonucleotide
  Target: PCSK9; (+) strand; PAM type: YTN; PAM sequence: CTG
ttcctttccaaccaggtgag

SEQ ID NO: 25673 - DNA, 20 bp, Artificial Sequence
  Description of Artificial Sequence: Synthetic oligonucleotide
  Target: PCSK9; (+) strand; PAM type: YTN; PAM sequence: TTC
ctttccaaccaggtgagacc

SEQ ID NO: 25674 - DNA, 20 bp, Artificial Sequence
  Description of Artificial Sequence: Synthetic oligonucleotide
  Target: PCSK9; (+) strand; PAM type: YTN; PAM sequence: CTT
tccaaccaggtgagacctct

SEQ ID NO: 25675 - DNA, 20 bp, Artificial Sequence
  Description of Artificial Sequence: Synthetic oligonucleotide
  Target: PCSK9; (+) strand; PAM type: YTN; PAM sequence: TTT
ccaaccaggtgagacctctt

SEQ ID NO: 25676 - DNA, 20 bp, Artificial Sequence
  Description of Artificial Sequence: Synthetic oligonucleotide
  Target: PCSK9; (+) strand; PAM type: YTN; PAM sequence: TTC
caaccaggtgagacctcttc

SEQ ID NO: 25677 - DNA, 20 bp, Artificial Sequence
  Description of Artificial Sequence: Synthetic oligonucleotide
  Target: PCSK9; (+) strand; PAM type: YTN; PAM sequence: CTC
ttcagtggagccctggagcc

SEQ ID NO: 25678 - DNA, 20 bp, Artificial Sequence
  Description of Artificial Sequence: Synthetic oligonucleotide
  Target: PCSK9; (+) strand; PAM type: YTN; PAM sequence: CTT
cagtggagccctggagcccc

SEQ ID NO: 25679 - DNA, 20 bp, Artificial Sequence
  Description of Artificial Sequence: Synthetic oligonucleotide
  Target: PCSK9; (+) strand; PAM type: YTN; PAM sequence: TTC
agtggagccctggagccccc

SEQ ID NO: 25680 - DNA, 20 bp, Artificial Sequence
  Description of Artificial Sequence: Synthetic oligonucleotide
  Target: PCSK9; (+) strand; PAM type: YTN; PAM sequence: CTG
gagccccctgtactccacat

SEQ ID NO: 25681 - DNA, 20 bp, Artificial Sequence
  Description of Artificial Sequence: Synthetic oligonucleotide
  Target: PCSK9; (+) strand; PAM type: YTN; PAM sequence: CTG
tactccacatcagtgcctca

SEQ ID NO: 25682 - DNA, 20 bp, Artificial Sequence
  Description of Artificial Sequence: Synthetic oligonucleotide
  Target: PCSK9; (+) strand; PAM type: YTN; PAM sequence: CTC
cacatcagtgcctcagggac

SEQ ID NO: 25683 - DNA, 20 bp, Artificial Sequence
  Description of Artificial Sequence: Synthetic oligonucleotide
  Target: PCSK9; (+) strand; PAM type: YTN; PAM sequence: CTC
agggacctcccggagcaggc

SEQ ID NO: 25684 - DNA, 20 bp, Artificial Sequence
  Description of Artificial Sequence: Synthetic oligonucleotide
  Target: PCSK9; (+) strand; PAM type: YTN; PAM sequence: CTC
ccggagcaggctaatatcag

SEQ ID NO: 25685 - DNA, 20 bp, Artificial Sequence
  Description of Artificial Sequence: Synthetic oligonucleotide
  Target: PCSK9; (+) strand; PAM type: YTN; PAM sequence: CTA
atatcagagaccaagaggga

SEQ ID NO: 25686 - DNA, 20 bp, Artificial Sequence
  Description of Artificial Sequence: Synthetic oligonucleotide
  Target: PCSK9; (+) strand; PAM type: YTN; PAM sequence: CTG
gcagaggatcacagagaccc

SEQ ID NO: 25687 - DNA, 20 bp, Artificial Sequence
  Description of Artificial Sequence: Synthetic oligonucleotide
  Target: PCSK9; (+) strand; PAM type: YTN; PAM sequence: CTG
agaagatcttgccccctaag

SEQ ID NO: 25688 - DNA, 20 bp, Artificial Sequence
  Description of Artificial Sequence: Synthetic oligonucleotide
  Target: PCSK9; (+) strand; PAM type: YTN; PAM sequence: CTT
gccccctaagttagtttcct

SEQ ID NO: 25689 - DNA, 20 bp, Artificial Sequence
  Description of Artificial Sequence: Synthetic oligonucleotide
  Target: PCSK9; (+) strand; PAM type: YTN; PAM sequence: TTG
ccccctaagttagtttccta

SEQ ID NO: 25690 - DNA, 20 bp, Artificial Sequence
  Description of Artificial Sequence: Synthetic oligonucleotide
  Target: PCSK9; (+) strand; PAM type: YTN; PAM sequence: CTA
agttagtttcctagcactgc

SEQ ID NO: 25691 - DNA, 20 bp, Artificial Sequence
  Description of Artificial Sequence: Synthetic oligonucleotide
  Target: PCSK9; (+) strand; PAM type: YTN; PAM sequence: TTA
gtttcctagcactgctgtga

SEQ ID NO: 25692 - DNA, 20 bp, Artificial Sequence
  Description of Artificial Sequence: Synthetic oligonucleotide
  Target: PCSK9; (+) strand; PAM type: YTN; PAM sequence: TTT
cctagcactgctgtgacaaa

SEQ ID NO: 25693 - DNA, 20 bp, Artificial Sequence
  Description of Artificial Sequence: Synthetic oligonucleotide
  Target: PCSK9; (+) strand; PAM type: YTN; PAM sequence: TTC
ctagcactgctgtgacaaat

SEQ ID NO: 25694 - DNA, 20 bp, Artificial Sequence
  Description of Artificial Sequence: Synthetic oligonucleotide
  Target: PCSK9; (+) strand; PAM type: YTN; PAM sequence: CTA
gcactgctgtgacaaattac

SEQ ID NO: 25695 - DNA, 20 bp, Artificial Sequence
  Description of Artificial Sequence: Synthetic oligonucleotide
  Target: PCSK9; (+) strand; PAM type: YTN; PAM sequence: CTG
ctgtgacaaattaccacccc

SEQ ID NO: 25696 - DNA, 20 bp, Artificial Sequence
  Description of Artificial Sequence: Synthetic oligonucleotide
  Target: PCSK9; (+) strand; PAM type: YTN; PAM sequence: CTG
tgacaaattaccaccccctc

SEQ ID NO: 25697 - DNA, 20 bp, Artificial Sequence
  Description of Artificial Sequence: Synthetic oligonucleotide
  Target: PCSK9; (+) strand; PAM type: YTN; PAM sequence: TTA
ccaccccctcggttggaaca

SEQ ID NO: 25698 - DNA, 20 bp, Artificial Sequence
  Description of Artificial Sequence: Synthetic oligonucleotide
  Target: PCSK9; (+) strand; PAM type: YTN; PAM sequence: CTC
ggttggaacaagttgattct

SEQ ID NO: 25699 - DNA, 20 bp, Artificial Sequence
  Description of Artificial Sequence: Synthetic oligonucleotide
  Target: PCSK9; (+) strand; PAM type: YTN; PAM sequence: TTG
gaacaagttgattctctgca

SEQ ID NO: 25700 - DNA, 20 bp, Artificial Sequence
  Description of Artificial Sequence: Synthetic oligonucleotide
  Target: PCSK9; (+) strand; PAM type: YTN; PAM sequence: TTG
attctctgcagtcctggagg

SEQ ID NO: 25701 - DNA, 20 bp, Artificial Sequence
  Description of Artificial Sequence: Synthetic oligonucleotide
  Target: PCSK9; (+) strand; PAM type: YTN; PAM sequence: TTC
tctgcagtcctggaggccag

SEQ ID NO: 25702 - DNA, 20 bp, Artificial Sequence
  Description of Artificial Sequence: Synthetic oligonucleotide
  Target: PCSK9; (+) strand; PAM type: YTN; PAM sequence: CTC
tgcagtcctggaggccagaa

SEQ ID NO: 25703 - DNA, 20 bp, Artificial Sequence
  Description of Artificial Sequence: Synthetic oligonucleotide
  Target: PCSK9; (+) strand; PAM type: YTN; PAM sequence: CTG
cagtcctggaggccagaagc

SEQ ID NO: 25704 - DNA, 20 bp, Artificial Sequence
  Description of Artificial Sequence: Synthetic oligonucleotide
  Target: PCSK9; (+) strand; PAM type: YTN; PAM sequence: CTG
gaggccagaagcctgaatca

SEQ ID NO: 25705 - DNA, 20 bp, Artificial Sequence
  Description of Artificial Sequence: Synthetic oligonucleotide
  Target: PCSK9; (+) strand; PAM type: YTN; PAM sequence: CTG
aatcagtgtcggcaggacca

SEQ ID NO: 25706 - DNA, 20 bp, Artificial Sequence
  Description of Artificial Sequence: Synthetic oligonucleotide
  Target: PCSK9; (+) strand; PAM type: YTN; PAM sequence: CTT
tctcccggggggctccaggg

SEQ ID NO: 25707 - DNA, 20 bp, Artificial Sequence
  Description of Artificial Sequence: Synthetic oligonucleotide
  Target: PCSK9; (+) strand; PAM type: YTN; PAM sequence: TTT
ctcccggggggctccaggga

SEQ ID NO: 25708 - DNA, 20 bp, Artificial Sequence
  Description of Artificial Sequence: Synthetic oligonucleotide
  Target: PCSK9; (+) strand; PAM type: YTN; PAM sequence: TTC
tcccggggggctccagggag

SEQ ID NO: 25709 - DNA, 20 bp, Artificial Sequence
  Description of Artificial Sequence: Synthetic oligonucleotide
  Target: PCSK9; (+) strand; PAM type: YTN; PAM sequence: CTC
ccggggggctccagggagaa

SEQ ID NO: 25710 - DNA, 20 bp, Artificial Sequence
  Description of Artificial Sequence: Synthetic oligonucleotide
  Target: PCSK9; (+) strand; PAM type: YTN; PAM sequence: CTC
cagggagaagcttctcttgc

SEQ ID NO: 25711 - DNA, 20 bp, Artificial Sequence
  Description of Artificial Sequence: Synthetic oligonucleotide
  Target: PCSK9; (+) strand; PAM type: YTN; PAM sequence: CTT
ctcttgcctcttccgtgtcc

SEQ ID NO: 25712 - DNA, 20 bp, Artificial Sequence
  Description of Artificial Sequence: Synthetic oligonucleotide
  Target: PCSK9; (+) strand; PAM type: YTN; PAM sequence: TTC
tcttgcctcttccgtgtccc

SEQ ID NO: 25713 - DNA, 20 bp, Artificial Sequence
  Description of Artificial Sequence: Synthetic oligonucleotide
  Target: PCSK9; (+) strand; PAM type: YTN; PAM sequence: CTC
ttgcctcttccgtgtcccaa

SEQ ID NO: 25714 - DNA, 20 bp, Artificial Sequence
  Description of Artificial Sequence: Synthetic oligonucleotide
  Target: PCSK9; (+) strand; PAM type: YTN; PAM sequence: CTT
gcctcttccgtgtcccaaca

SEQ ID NO: 25715 - DNA, 20 bp, Artificial Sequence
  Description of Artificial Sequence: Synthetic oligonucleotide
  Target: PCSK9; (+) strand; PAM type: YTN; PAM sequence: TTG
cctcttccgtgtcccaacag

SEQ ID NO: 25716 - DNA, 20 bp, Artificial Sequence
  Description of Artificial Sequence: Synthetic oligonucleotide
  Target: PCSK9; (+) strand; PAM type: YTN; PAM sequence: CTC
ttccgtgtcccaacagcggc

SEQ ID NO: 25717 - DNA, 20 bp, Artificial Sequence
  Description of Artificial Sequence: Synthetic oligonucleotide
  Target: PCSK9; (+) strand; PAM type: YTN; PAM sequence: CTT
ccgtgtcccaacagcggcag

SEQ ID NO: 25718 - DNA, 20 bp, Artificial Sequence
  Description of Artificial Sequence: Synthetic oligonucleotide
  Target: PCSK9; (+) strand; PAM type: YTN; PAM sequence: TTC
cgtgtcccaacagcggcagc

SEQ ID NO: 25719 - DNA, 20 bp, Artificial Sequence
  Description of Artificial Sequence: Synthetic oligonucleotide
  Target: PCSK9; (+) strand; PAM type: YTN; PAM sequence: CTC
tgtcttcacacagccttctc

SEQ ID NO: 25720 - DNA, 20 bp, Artificial Sequence
  Description of Artificial Sequence: Synthetic oligonucleotide
  Target: PCSK9; (+) strand; PAM type: YTN; PAM sequence: CTG
tcttcacacagccttctctg

SEQ ID NO: 25721 - DNA, 20 bp, Artificial Sequence
  Description of Artificial Sequence: Synthetic oligonucleotide
  Target: PCSK9; (+) strand; PAM type: YTN; PAM sequence: CTT
cacacagccttctctgtgtc

SEQ ID NO: 25722 - DNA, 20 bp, Artificial Sequence
  Description of Artificial Sequence: Synthetic oligonucleotide
  Target: PCSK9; (+) strand; PAM type: YTN; PAM sequence: TTC
acacagccttctctgtgtct

SEQ ID NO: 25723 - DNA, 20 bp, Artificial Sequence
  Description of Artificial Sequence: Synthetic oligonucleotide
  Target: PCSK9; (+) strand; PAM type: YTN; PAM sequence: CTT
ctctgtgtctctctcctctt

SEQ ID NO: 25724 - DNA, 20 bp, Artificial Sequence
  Description of Artificial Sequence: Synthetic oligonucleotide
  Target: PCSK9; (+) strand; PAM type: YTN; PAM sequence: TTC
tctgtgtctctctcctcttc

SEQ ID NO: 25725 - DNA, 20 bp, Artificial Sequence
  Description of Artificial Sequence: Synthetic oligonucleotide
  Target: PCSK9; (+) strand; PAM type: YTN; PAM sequence: CTC
tgtgtctctctcctcttcat

SEQ ID NO: 25726 - DNA, 20 bp, Artificial Sequence
  Description of Artificial Sequence: Synthetic oligonucleotide
  Target: PCSK9; (+) strand; PAM type: YTN; PAM sequence: CTG
tgtctctctcctcttcattg

SEQ ID NO: 25727 - DNA, 20 bp, Artificial Sequence
  Description of Artificial Sequence: Synthetic oligonucleotide
  Target: PCSK9; (+) strand; PAM type: YTN; PAM sequence: CTC
tctcctcttcattgtctcat

SEQ ID NO: 25728 - DNA, 20 bp, Artificial Sequence
  Description of Artificial Sequence: Synthetic oligonucleotide
  Target: PCSK9; (+) strand; PAM type: YTN; PAM sequence: CTC
tcctcttcattgtctcataa

SEQ ID NO: 25729 - DNA, 20 bp, Artificial Sequence
  Description of Artificial Sequence: Synthetic oligonucleotide
  Target: PCSK9; (+) strand; PAM type: YTN; PAM sequence: CTC
ctcttcattgtctcataagg

SEQ ID NO: 25730 - DNA, 20 bp, Artificial Sequence
  Description of Artificial Sequence: Synthetic oligonucleotide
  Target: PCSK9; (+) strand; PAM type: YTN; PAM sequence: CTC
ttcattgtctcataaggaca

SEQ ID NO: 25731 - DNA, 20 bp, Artificial Sequence
  Description of Artificial Sequence: Synthetic oligonucleotide
  Target: PCSK9; (+) strand; PAM type: YTN; PAM sequence: CTT
cattgtctcataaggacact

SEQ ID NO: 25732 - DNA, 20 bp, Artificial Sequence
  Description of Artificial Sequence: Synthetic oligonucleotide
  Target: PCSK9; (+) strand; PAM type: YTN; PAM sequence: TTC
attgtctcataaggacactt

SEQ ID NO: 25733 - DNA, 20 bp, Artificial Sequence
  Description of Artificial Sequence: Synthetic oligonucleotide
  Target: PCSK9; (+) strand; PAM type: YTN; PAM sequence: TTG
tctcataaggacacttgtca

SEQ ID NO: 25734 - DNA, 20 bp, Artificial Sequence
  Description of Artificial Sequence: Synthetic oligonucleotide
  Target: PCSK9; (+) strand; PAM type: YTN; PAM sequence: CTC
ataaggacacttgtcattgg

SEQ ID NO: 25735 - DNA, 20 bp, Artificial Sequence
  Description of Artificial Sequence: Synthetic oligonucleotide
  Target: PCSK9; (+) strand; PAM type: YTN; PAM sequence: CTT
gtcattggatttagggccca

SEQ ID NO: 25736 - DNA, 20 bp, Artificial Sequence
  Description of Artificial Sequence: Synthetic oligonucleotide
  Target: PCSK9; (+) strand; PAM type: YTN; PAM sequence: TTG
tcattggatttagggcccac

SEQ ID NO: 25737 - DNA, 20 bp, Artificial Sequence
  Description of Artificial Sequence: Synthetic oligonucleotide
  Target: PCSK9; (+) strand; PAM type: YTN; PAM sequence: TTG
gatttagggcccactggatc

SEQ ID NO: 25738 - DNA, 20 bp, Artificial Sequence
  Description of Artificial Sequence: Synthetic oligonucleotide
  Target: PCSK9; (+) strand; PAM type: YTN; PAM sequence: TTT
agggcccactggatcctcca

SEQ ID NO: 25739 - DNA, 20 bp, Artificial Sequence
  Description of Artificial Sequence: Synthetic oligonucleotide
  Target: PCSK9; (+) strand; PAM type: YTN; PAM sequence: TTA
gggcccactggatcctccag

SEQ ID NO: 25740 - DNA, 20 bp, Artificial Sequence
  Description of Artificial Sequence: Synthetic oligonucleotide
  Target: PCSK9; (+) strand; PAM type: YTN; PAM sequence: CTG
gatcctccaggatgatctca

SEQ ID NO: 25741 - DNA, 20 bp, Artificial Sequence
  Description of Artificial Sequence: Synthetic oligonucleotide
  Target: PCSK9; (+) strand; PAM type: YTN; PAM sequence: CTC
caggatgatctcatgtgggg

SEQ ID NO: 25742 - DNA, 20 bp, Artificial Sequence
  Description of Artificial Sequence: Synthetic oligonucleotide
  Target: PCSK9; (+) strand; PAM type: YTN; PAM sequence: CTC
atgtggggaaccttaaccac

SEQ ID NO: 25743 - DNA, 20 bp, Artificial Sequence
  Description of Artificial Sequence: Synthetic oligonucleotide
  Target: PCSK9; (+) strand; PAM type: YTN; PAM sequence: CTT
aaccacatctgcaaggaccc

SEQ ID NO: 25744 - DNA, 20 bp, Artificial Sequence
  Description of Artificial Sequence: Synthetic oligonucleotide
  Target: PCSK9; (+) strand; PAM type: YTN; PAM sequence: TTA
accacatctgcaaggaccct

SEQ ID NO: 25745 - DNA, 20 bp, Artificial Sequence
  Description of Artificial Sequence: Synthetic oligonucleotide
  Target: PCSK9; (+) strand; PAM type: YTN; PAM sequence: CTG
caaggaccctttttccaaat

SEQ ID NO: 25746 - DNA, 20 bp, Artificial Sequence
  Description of Artificial Sequence: Synthetic oligonucleotide
  Target: PCSK9; (+) strand; PAM type: YTN; PAM sequence: CTT
tttccaaataaggtcacagc

SEQ ID NO: 25747 - DNA, 20 bp, Artificial Sequence
  Description of Artificial Sequence: Synthetic oligonucleotide
  Target: PCSK9; (+) strand; PAM type: YTN; PAM sequence: TTT
ttccaaataaggtcacagcc

SEQ ID NO: 25748 - DNA, 20 bp, Artificial Sequence
  Description of Artificial Sequence: Synthetic oligonucleotide
  Target: PCSK9; (+) strand; PAM type: YTN; PAM sequence: TTT
tccaaataaggtcacagcca

SEQ ID NO: 25749 - DNA, 20 bp, Artificial Sequence
  Description of Artificial Sequence: Synthetic oligonucleotide
  Target: PCSK9; (+) strand; PAM type: YTN; PAM sequence: TTT
ccaaataaggtcacagccac

SEQ ID NO: 25750 - DNA, 20 bp, Artificial Sequence
  Description of Artificial Sequence: Synthetic oligonucleotide
  Target: PCSK9; (+) strand; PAM type: YTN; PAM sequence: TTC
caaataaggtcacagccaca

SEQ ID NO: 25751 - DNA, 20 bp, Artificial Sequence
  Description of Artificial Sequence: Synthetic oligonucleotide
  Target: PCSK9; (+) strand; PAM type: YTN; PAM sequence: TTG
tgggggttaggatgtgagtg

SEQ ID NO: 25752 - DNA, 20 bp, Artificial Sequence
  Description of Artificial Sequence: Synthetic oligonucleotide
  Target: PCSK9; (+) strand; PAM type: YTN; PAM sequence: TTA
ggatgtgagtgtatctcttt

SEQ ID NO: 25753 - DNA, 20 bp, Artificial Sequence
  Description of Artificial Sequence: Synthetic oligonucleotide
  Target: PCSK9; (+) strand; PAM type: YTN; PAM sequence: CTC
tttggcagccactgttccct

SEQ ID NO: 25754 - DNA, 20 bp, Artificial Sequence
  Description of Artificial Sequence: Synthetic oligonucleotide
  Target: PCSK9; (+) strand; PAM type: YTN; PAM sequence: CTT
tggcagccactgttccctcc

SEQ ID NO: 25755 - DNA, 20 bp, Artificial Sequence
  Description of Artificial Sequence: Synthetic oligonucleotide
  Target: PCSK9; (+) strand; PAM type: YTN; PAM sequence: TTT
ggcagccactgttccctcct

SEQ ID NO: 25756 - DNA, 20 bp, Artificial Sequence
  Description of Artificial Sequence: Synthetic oligonucleotide
  Target: PCSK9; (+) strand; PAM type: YTN; PAM sequence: TTG
gcagccactgttccctcctc

SEQ ID NO: 25757 - DNA, 20 bp, Artificial Sequence
  Description of Artificial Sequence: Synthetic oligonucleotide
  Target: PCSK9; (+) strand; PAM type: YTN; PAM sequence: CTG
ttccctcctctcccttgggc

SEQ ID NO: 25758 - DNA, 20 bp, Artificial Sequence
  Description of Artificial Sequence: Synthetic oligonucleotide
  Target: PCSK9; (+) strand; PAM type: YTN; PAM sequence: TTC
cctcctctcccttgggccag

SEQ ID NO: 25759 - DNA, 20 bp, Artificial Sequence
  Description of Artificial Sequence: Synthetic oligonucleotide
  Target: PCSK9; (+) strand; PAM type: YTN; PAM sequence: CTC
ctctcccttgggccagaagc

SEQ ID NO: 25760 - DNA, 20 bp, Artificial Sequence
  Description of Artificial Sequence: Synthetic oligonucleotide
  Target: PCSK9; (+) strand; PAM type: YTN; PAM sequence: CTC
tcccttgggccagaagcaga

SEQ ID NO: 25761 - DNA, 20 bp, Artificial Sequence
  Description of Artificial Sequence: Synthetic oligonucleotide
  Target: PCSK9; (+) strand; PAM type: YTN; PAM sequence: CTC
ccttgggccagaagcagacg

SEQ ID NO: 25762 - DNA, 20 bp, Artificial Sequence
  Description of Artificial Sequence: Synthetic oligonucleotide
  Target: PCSK9; (+) strand; PAM type: YTN; PAM sequence: CTT
gggccagaagcagacgtggg

SEQ ID NO: 25763 - DNA, 20 bp, Artificial Sequence
  Description of Artificial Sequence: Synthetic oligonucleotide
  Target: PCSK9; (+) strand; PAM type: YTN; PAM sequence: TTG
ggccagaagcagacgtgggg

SEQ ID NO: 25764 - DNA, 20 bp, Artificial Sequence
  Description of Artificial Sequence: Synthetic oligonucleotide
  Target: PCSK9; (+) strand; PAM type: YTN; PAM sequence: CTT
tcttccccataggatgccca

SEQ ID NO: 25765 - DNA, 20 bp, Artificial Sequence
  Description of Artificial Sequence: Synthetic oligonucleotide
  Target: PCSK9; (+) strand; PAM type: YTN; PAM sequence: TTT
cttccccataggatgcccat

SEQ ID NO: 25766 - DNA, 20 bp, Artificial Sequence
  Description of Artificial Sequence: Synthetic oligonucleotide
  Target: PCSK9; (+) strand; PAM type: YTN; PAM sequence: TTC
ttccccataggatgcccatg

SEQ ID NO: 25767 - DNA, 20 bp, Artificial Sequence
  Description of Artificial Sequence: Synthetic oligonucleotide
  Target: PCSK9; (+) strand; PAM type: YTN; PAM sequence: CTT
ccccataggatgcccatgga

SEQ ID NO: 25768 - DNA, 20 bp, Artificial Sequence
  Description of Artificial Sequence: Synthetic oligonucleotide
  Target: PCSK9; (+) strand; PAM type: YTN; PAM sequence: TTC
cccataggatgcccatggat

SEQ ID NO: 25769 - DNA, 20 bp, Artificial Sequence
  Description of Artificial Sequence: Synthetic oligonucleotide
  Target: PCSK9; (+) strand; PAM type: YTN; PAM sequence: TTG
ccccccttcccgcttccccc

SEQ ID NO: 25770 - DNA, 20 bp, Artificial Sequence
  Description of Artificial Sequence: Synthetic oligonucleotide
  Target: PCSK9; (+) strand; PAM type: YTN; PAM sequence: CTT
cccgcttcccccgagtgtct

SEQ ID NO: 25771 - DNA, 20 bp, Artificial Sequence
  Description of Artificial Sequence: Synthetic oligonucleotide
  Target: PCSK9; (+) strand; PAM type: YTN; PAM sequence: TTC
ccgcttcccccgagtgtctg

SEQ ID NO: 25772 - DNA, 20 bp, Artificial Sequence
  Description of Artificial Sequence: Synthetic oligonucleotide
  Target: PCSK9; (+) strand; PAM type: YTN; PAM sequence: CTT
cccccgagtgtctgtgggag

SEQ ID NO: 25773 - DNA, 20 bp, Artificial Sequence
  Description of Artificial Sequence: Synthetic oligonucleotide
  Target: PCSK9; (+) strand; PAM type: YTN; PAM sequence: TTC
ccccgagtgtctgtgggagg

SEQ ID NO: 25774 - DNA, 20 bp, Artificial Sequence
  Description of Artificial Sequence: Synthetic oligonucleotide
  Target: PCSK9; (+) strand; PAM type: YTN; PAM sequence: CTG
tgggaggtggcaggaatggc

SEQ ID NO: 25775 - DNA, 20 bp, Artificial Sequence
  Description of Artificial Sequence: Synthetic oligonucleotide
  Target: PCSK9; (+) strand; PAM type: YTN; PAM sequence: CTT
ctggagtcatatcaagggct

SEQ ID NO: 25776 - DNA, 20 bp, Artificial Sequence
  Description of Artificial Sequence: Synthetic oligonucleotide
  Target: PCSK9; (+) strand; PAM type: YTN; PAM sequence: TTC
tggagtcatatcaagggctt

SEQ ID NO: 25777 - DNA, 20 bp, Artificial Sequence
  Description of Artificial Sequence: Synthetic oligonucleotide
  Target: PCSK9; (+) strand; PAM type: YTN; PAM sequence: CTG
gagtcatatcaagggcttgg

SEQ ID NO: 25778 - DNA, 20 bp, Artificial Sequence
  Description of Artificial Sequence: Synthetic oligonucleotide
  Target: PCSK9; (+) strand; PAM type: YTN; PAM sequence: CTT
ggctggaggaagtcctcctg

SEQ ID NO: 25779 - DNA, 20 bp, Artificial Sequence
  Description of Artificial Sequence: Synthetic oligonucleotide
  Target: PCSK9; (+) strand; PAM type: YTN; PAM sequence: TTG
gctggaggaagtcctcctgg

SEQ ID NO: 25780 - DNA, 20 bp, Artificial Sequence
  Description of Artificial Sequence: Synthetic oligonucleotide
  Target: PCSK9; (+) strand; PAM type: YTN; PAM sequence: CTG
gaggaagtcctcctggagct

SEQ ID NO: 25781 - DNA, 20 bp, Artificial Sequence
  Description of Artificial Sequence: Synthetic oligonucleotide
  Target: PCSK9; (+) strand; PAM type: YTN; PAM sequence: CTC
ctggagctgttgggctggca

SEQ ID NO: 25782 - DNA, 20 bp, Artificial Sequence
  Description of Artificial Sequence: Synthetic oligonucleotide
  Target: PCSK9; (+) strand; PAM type: YTN; PAM sequence: CTG
gagctgttgggctggcatgg

SEQ ID NO: 25783 - DNA, 20 bp, Artificial Sequence
  Description of Artificial Sequence: Synthetic oligonucleotide
  Target: PCSK9; (+) strand; PAM type: YTN; PAM sequence: CTG
ttgggctggcatggggcagg

SEQ ID NO: 25784 - DNA, 20 bp, Artificial Sequence
  Description of Artificial Sequence: Synthetic oligonucleotide
  Target: PCSK9; (+) strand; PAM type: YTN; PAM sequence: TTG
ggctggcatggggcaggctg

SEQ ID NO: 25785 - DNA, 20 bp, Artificial Sequence
  Description of Artificial Sequence: Synthetic oligonucleotide
  Target: PCSK9; (+) strand; PAM type: YTN; PAM sequence: CTG
gcatggggcaggctggctgg

SEQ ID NO: 25786 - DNA, 20 bp, Artificial Sequence
  Description of Artificial Sequence: Synthetic oligonucleotide
  Target: PCSK9; (+) strand; PAM type: YTN; PAM sequence: CTG
gctgggcccagcagcagctt

SEQ ID NO: 25787 - DNA, 20 bp, Artificial Sequence
  Description of Artificial Sequence: Synthetic oligonucleotide
  Target: PCSK9; (+) strand; PAM type: YTN; PAM sequence: CTG
ggcccagcagcagcttcttc

SEQ ID NO: 25788 - DNA, 20 bp, Artificial Sequence
  Description of Artificial Sequence: Synthetic oligonucleotide
  Target: PCSK9; (+) strand; PAM type: YTN; PAM sequence: CTT
cttcattcatggggaggcca

SEQ ID NO: 25789 - DNA, 20 bp, Artificial Sequence
  Description of Artificial Sequence: Synthetic oligonucleotide
  Target: PCSK9; (+) strand; PAM type: YTN; PAM sequence: TTC
ttcattcatggggaggccac

SEQ ID NO: 25790 - DNA, 20 bp, Artificial Sequence
  Description of Artificial Sequence: Synthetic oligonucleotide
  Target: PCSK9; (+) strand; PAM type: YTN; PAM sequence: CTT
cattcatggggaggccacaa

SEQ ID NO: 25791 - DNA, 20 bp, Artificial Sequence
  Description of Artificial Sequence: Synthetic oligonucleotide
  Target: PCSK9; (+) strand; PAM type: YTN; PAM sequence: TTC
attcatggggaggccacaag

SEQ ID NO: 25792 - DNA, 20 bp, Artificial Sequence
  Description of Artificial Sequence: Synthetic oligonucleotide
  Target: PCSK9; (+) strand; PAM type: YTN; PAM sequence: TTC
atggggaggccacaagcatg

SEQ ID NO: 25793 - DNA, 20 bp, Artificial Sequence
  Description of Artificial Sequence: Synthetic oligonucleotide
  Target: PCSK9; (+) strand; PAM type: YTN; PAM sequence: CTA
gagctggctgccgccctcaa

SEQ ID NO: 25794 - DNA, 20 bp, Artificial Sequence
  Description of Artificial Sequence: Synthetic oligonucleotide
  Target: PCSK9; (+) strand; PAM type: YTN; PAM sequence: CTG
gctgccgccctcaaacccag

SEQ ID NO: 25795 - DNA, 20 bp, Artificial Sequence
  Description of Artificial Sequence: Synthetic oligonucleotide
  Target: PCSK9; (+) strand; PAM type: YTN; PAM sequence: CTG
ccgccctcaaacccagaccc

SEQ ID NO: 25796 - DNA, 20 bp, Artificial Sequence
  Description of Artificial Sequence: Synthetic oligonucleotide
  Target: PCSK9; (+) strand; PAM type: YTN; PAM sequence: CTC
aaacccagaccctgcactct

SEQ ID NO: 25797 - DNA, 20 bp, Artificial Sequence
  Description of Artificial Sequence: Synthetic oligonucleotide
  Target: PCSK9; (+) strand; PAM type: YTN; PAM sequence: CTG
cactcttaactgtgtgacct

SEQ ID NO: 25798 - DNA, 20 bp, Artificial Sequence
  Description of Artificial Sequence: Synthetic oligonucleotide
  Target: PCSK9; (+) strand; PAM type: YTN; PAM sequence: CTC
ttaactgtgtgaccttgcat

SEQ ID NO: 25799 - DNA, 20 bp, Artificial Sequence
  Description of Artificial Sequence: Synthetic oligonucleotide
  Target: PCSK9; (+) strand; PAM type: YTN; PAM sequence: CTT
aactgtgtgaccttgcatac

SEQ ID NO: 25800 - DNA, 20 bp, Artificial Sequence
  Description of Artificial Sequence: Synthetic oligonucleotide
  Target: PCSK9; (+) strand; PAM type: YTN; PAM sequence: TTA
actgtgtgaccttgcatacg

SEQ ID NO: 25801 - DNA, 20 bp, Artificial Sequence
  Description of Artificial Sequence: Synthetic oligonucleotide
  Target: PCSK9; (+) strand; PAM type: YTN; PAM sequence: CTG
tgtgaccttgcatacgtcac

SEQ ID NO: 25802 - DNA, 20 bp, Artificial Sequence
  Description of Artificial Sequence: Synthetic oligonucleotide
  Target: PCSK9; (+) strand; PAM type: YTN; PAM sequence: CTT
gcatacgtcactcaccctct

SEQ ID NO: 25803 - DNA, 20 bp, Artificial Sequence
  Description of Artificial Sequence: Synthetic oligonucleotide
  Target: PCSK9; (+) strand; PAM type: YTN; PAM sequence: TTG
catacgtcactcaccctctc

SEQ ID NO: 25804 - DNA, 20 bp, Artificial Sequence
  Description of Artificial Sequence: Synthetic oligonucleotide
  Target: PCSK9; (+) strand; PAM type: YTN; PAM sequence: CTC
accctctctgatcttcaggt

SEQ ID NO: 25805 - DNA, 20 bp, Artificial Sequence
  Description of Artificial Sequence: Synthetic oligonucleotide
  Target: PCSK9; (+) strand; PAM type: YTN; PAM sequence: CTC
tctgatcttcaggttcctct

SEQ ID NO: 25806 - DNA, 20 bp, Artificial Sequence
  Description of Artificial Sequence: Synthetic oligonucleotide
  Target: PCSK9; (+) strand; PAM type: YTN; PAM sequence: CTC
tgatcttcaggttcctctgc

SEQ ID NO: 25807 - DNA, 20 bp, Artificial Sequence
  Description of Artificial Sequence: Synthetic oligonucleotide
  Target: PCSK9; (+) strand; PAM type: YTN; PAM sequence: CTG
atcttcaggttcctctgcaa

SEQ ID NO: 25808 - DNA, 20 bp, Artificial Sequence
  Description of Artificial Sequence: Synthetic oligonucleotide
  Target: PCSK9; (+) strand; PAM type: YTN; PAM sequence: CTT
caggttcctctgcaaaaggg

SEQ ID NO: 25809 - DNA, 20 bp, Artificial Sequence
  Description of Artificial Sequence: Synthetic oligonucleotide
  Target: PCSK9; (+) strand; PAM type: YTN; PAM sequence: TTC
aggttcctctgcaaaaggga

SEQ ID NO: 25810 - DNA, 20 bp, Artificial Sequence
  Description of Artificial Sequence: Synthetic oligonucleotide
  Target: PCSK9; (+) strand; PAM type: YTN; PAM sequence: TTC
ctctgcaaaagggaggtaat

SEQ ID NO: 25811 - DNA, 20 bp, Artificial Sequence
  Description of Artificial Sequence: Synthetic oligonucleotide
  Target: PCSK9; (+) strand; PAM type: YTN; PAM sequence: CTC
tgcaaaagggaggtaatgat

SEQ ID NO: 25812 - DNA, 20 bp, Artificial Sequence
  Description of Artificial Sequence: Synthetic oligonucleotide
  Target: PCSK9; (+) strand; PAM type: YTN; PAM sequence: CTG
caaaagggaggtaatgataa

SEQ ID NO: 25813 - DNA, 20 bp, Artificial Sequence
  Description of Artificial Sequence: Synthetic oligonucleotide
  Target: PCSK9; (+) strand; PAM type: YTN; PAM sequence: CTC
actctggggggctgtttgga

SEQ ID NO: 25814 - DNA, 20 bp, Artificial Sequence
  Description of Artificial Sequence: Synthetic oligonucleotide
  Target: PCSK9; (+) strand; PAM type: YTN; PAM sequence: CTC
tggggggctgtttggagggt

SEQ ID NO: 25815 - DNA, 20 bp, Artificial Sequence
  Description of Artificial Sequence: Synthetic oligonucleotide
  Target: PCSK9; (+) strand; PAM type: YTN; PAM sequence: CTG
gggggctgtttggagggtta

SEQ ID NO: 25816 - DNA, 20 bp, Artificial Sequence
  Description of Artificial Sequence: Synthetic oligonucleotide
  Target: PCSK9; (+) strand; PAM type: YTN; PAM sequence: CTG
tttggagggttaaatcagtt

SEQ ID NO: 25817 - DNA, 20 bp, Artificial Sequence
  Description of Artificial Sequence: Synthetic oligonucleotide
  Target: PCSK9; (+) strand; PAM type: YTN; PAM sequence: TTT
ggagggttaaatcagttatt

SEQ ID NO: 25818 - DNA, 20 bp, Artificial Sequence
  Description of Artificial Sequence: Synthetic oligonucleotide
  Target: PCSK9; (+) strand; PAM type: YTN; PAM sequence: TTG
gagggttaaatcagttattg

SEQ ID NO: 25819 - DNA, 20 bp, Artificial Sequence
  Description of Artificial Sequence: Synthetic oligonucleotide
  Target: PCSK9; (+) strand; PAM type: YTN; PAM sequence: TTA
aatcagttattgctgtagca

SEQ ID NO: 25820 - DNA, 20 bp, Artificial Sequence
  Description of Artificial Sequence: Synthetic oligonucleotide
  Target: PCSK9; (+) strand; PAM type: YTN; PAM sequence: TTA
ttgctgtagcatgcatttct

SEQ ID NO: 25821 - DNA, 20 bp, Artificial Sequence
  Description of Artificial Sequence: Synthetic oligonucleotide
  Target: PCSK9; (+) strand; PAM type: YTN; PAM sequence: TTG
ctgtagcatgcatttctctg

SEQ ID NO: 25822 - DNA, 20 bp, Artificial Sequence
  Description of Artificial Sequence: Synthetic oligonucleotide
  Target: PCSK9; (+) strand; PAM type: YTN; PAM sequence: CTG
tagcatgcatttctctgtca

SEQ ID NO: 25823 - DNA, 20 bp, Artificial Sequence
  Description of Artificial Sequence: Synthetic oligonucleotide
  Target: PCSK9; (+) strand; PAM type: YTN; PAM sequence: TTT
ctctgtcaggtattgagtga

SEQ ID NO: 25824 - DNA, 20 bp, Artificial Sequence
  Description of Artificial Sequence: Synthetic oligonucleotide
  Target: PCSK9; (+) strand; PAM type: YTN; PAM sequence: TTC
tctgtcaggtattgagtgag

SEQ ID NO: 25825 - DNA, 20 bp, Artificial Sequence
  Description of Artificial Sequence: Synthetic oligonucleotide
  Target: PCSK9; (+) strand; PAM type: YTN; PAM sequence: CTC
tgtcaggtattgagtgaggt

SEQ ID NO: 25826 - DNA, 20 bp, Artificial Sequence
  Description of Artificial Sequence: Synthetic oligonucleotide
  Target: PCSK9; (+) strand; PAM type: YTN; PAM sequence: CTG
tcaggtattgagtgaggtgc

SEQ ID NO: 25827 - DNA, 20 bp, Artificial Sequence
  Description of Artificial Sequence: Synthetic oligonucleotide
  Target: PCSK9; (+) strand; PAM type: YTN; PAM sequence: TTG
agtgaggtgctgtgatttta

SEQ ID NO: 25828 - DNA, 20 bp, Artificial Sequence
  Description of Artificial Sequence: Synthetic oligonucleotide
  Target: PCSK9; (+) strand; PAM type: YTN; PAM sequence: CTG
tgattttagccctgcatttt

SEQ ID NO: 25829 - DNA, 20 bp, Artificial Sequence
  Description of Artificial Sequence: Synthetic oligonucleotide
  Target: PCSK9; (+) strand; PAM type: YTN; PAM sequence: TTT
tagccctgcatttttctttt

SEQ ID NO: 25830 - DNA, 20 bp, Artificial Sequence
  Description of Artificial Sequence: Synthetic oligonucleotide
  Target: PCSK9; (+) strand; PAM type: YTN; PAM sequence: TTT
agccctgcatttttcttttc

SEQ ID NO: 25831 - DNA, 20 bp, Artificial Sequence
  Description of Artificial Sequence: Synthetic oligonucleotide
  Target: PCSK9; (+) strand; PAM type: YTN; PAM sequence: TTA
gccctgcatttttcttttct

SEQ ID NO: 25832 - DNA, 20 bp, Artificial Sequence
  Description of Artificial Sequence: Synthetic oligonucleotide
  Target: PCSK9; (+) strand; PAM type: YTN; PAM sequence: CTG
catttttcttttcttaccat

SEQ ID NO: 25833 - DNA, 20 bp, Artificial Sequence
  Description of Artificial Sequence: Synthetic oligonucleotide
  Target: PCSK9; (+) strand; PAM type: YTN; PAM sequence: TTT
ttcttttcttaccattcaat

SEQ ID NO: 25834 - DNA, 20 bp, Artificial Sequence
  Description of Artificial Sequence: Synthetic oligonucleotide
  Target: PCSK9; (+) strand; PAM type: YTN; PAM sequence: TTT
tcttttcttaccattcaata

SEQ ID NO: 25835 - DNA, 20 bp, Artificial Sequence
  Description of Artificial Sequence: Synthetic oligonucleotide
  Target: PCSK9; (+) strand; PAM type: YTN; PAM sequence: TTT
cttttcttaccattcaataa

SEQ ID NO: 25836 - DNA, 20 bp, Artificial Sequence
  Description of Artificial Sequence: Synthetic oligonucleotide
  Target: PCSK9; (+) strand; PAM type: YTN; PAM sequence: TTC
ttttcttaccattcaataat

SEQ ID NO: 25837 - DNA, 20 bp, Artificial Sequence
  Description of Artificial Sequence: Synthetic oligonucleotide
  Target: PCSK9; (+) strand; PAM type: YTN; PAM sequence: CTT
ttcttaccattcaataataa

SEQ ID NO: 25838 - DNA, 20 bp, Artificial Sequence
  Description of Artificial Sequence: Synthetic oligonucleotide
  Target: PCSK9; (+) strand; PAM type: YTN; PAM sequence: TTT
tcttaccattcaataataac

SEQ ID NO: 25839 - DNA, 20 bp, Artificial Sequence
  Description of Artificial Sequence: Synthetic oligonucleotide
  Target: PCSK9; (+) strand; PAM type: YTN; PAM sequence: TTT
cttaccattcaataataacg

SEQ ID NO: 25840 - DNA, 20 bp, Artificial Sequence
  Description of Artificial Sequence: Synthetic oligonucleotide
  Target: PCSK9; (+) strand; PAM type: YTN; PAM sequence: TTC
ttaccattcaataataacgt

SEQ ID NO: 25841 - DNA, 20 bp, Artificial Sequence
  Description of Artificial Sequence: Synthetic oligonucleotide
  Target: PCSK9; (+) strand; PAM type: YTN; PAM sequence: CTT
accattcaataataacgttt

SEQ ID NO: 25842 - DNA, 20 bp, Artificial Sequence
  Description of Artificial Sequence: Synthetic oligonucleotide
  Target: PCSK9; (+) strand; PAM type: YTN; PAM sequence: TTA
ccattcaataataacgtttt

SEQ ID NO: 25843 - DNA, 20 bp, Artificial Sequence
  Description of Artificial Sequence: Synthetic oligonucleotide
  Target: PCSK9; (+) strand; PAM type: YTN; PAM sequence: TTC
aataataacgttttgagcac

SEQ ID NO: 25844 - DNA, 20 bp, Artificial Sequence
  Description of Artificial Sequence: Synthetic oligonucleotide
  Target: PCSK9; (+) strand; PAM type: YTN; PAM sequence: TTT
tgagcacccactgtgcgcca

SEQ ID NO: 25845 - DNA, 20 bp, Artificial Sequence
  Description of Artificial Sequence: Synthetic oligonucleotide
  Target: PCSK9; (+) strand; PAM type: YTN; PAM sequence: TTT
gagcacccactgtgcgccag

SEQ ID NO: 25846 - DNA, 20 bp, Artificial Sequence
  Description of Artificial Sequence: Synthetic oligonucleotide
  Target: PCSK9; (+) strand; PAM type: YTN; PAM sequence: TTG
agcacccactgtgcgccagg

SEQ ID NO: 25847 - DNA, 20 bp, Artificial Sequence
  Description of Artificial Sequence: Synthetic oligonucleotide
  Target: PCSK9; (+) strand; PAM type: YTN; PAM sequence: CTG
tgcgccaggcaccatattag

SEQ ID NO: 25848 - DNA, 20 bp, Artificial Sequence
  Description of Artificial Sequence: Synthetic oligonucleotide
  Target: PCSK9; (+) strand; PAM type: YTN; PAM sequence: TTA
ggtgctggggatacaaatgt

SEQ ID NO: 25849 - DNA, 20 bp, Artificial Sequence
  Description of Artificial Sequence: Synthetic oligonucleotide
  Target: PCSK9; (+) strand; PAM type: YTN; PAM sequence: CTG
gggatacaaatgtgaatgaa

SEQ ID NO: 25850 - DNA, 20 bp, Artificial Sequence
  Description of Artificial Sequence: Synthetic oligonucleotide
  Target: PCSK9; (+) strand; PAM type: YTN; PAM sequence: CTC
ttcccccaacagtgtatcca

SEQ ID NO: 25851 - DNA, 20 bp, Artificial Sequence
  Description of Artificial Sequence: Synthetic oligonucleotide
  Target: PCSK9; (+) strand; PAM type: YTN; PAM sequence: CTT
cccccaacagtgtatccaga

SEQ ID NO: 25852 - DNA, 20 bp, Artificial Sequence
  Description of Artificial Sequence: Synthetic oligonucleotide
  Target: PCSK9; (+) strand; PAM type: YTN; PAM sequence: TTC
ccccaacagtgtatccagaa

SEQ ID NO: 25853 - DNA, 20 bp, Artificial Sequence
  Description of Artificial Sequence: Synthetic oligonucleotide
  Target: PCSK9; (+) strand; PAM type: YTN; PAM sequence: TTA
atccattccttaaacaaatg

SEQ ID NO: 25854 - DNA, 20 bp, Artificial Sequence
  Description of Artificial Sequence: Synthetic oligonucleotide
  Target: PCSK9; (+) strand; PAM type: YTN; PAM sequence: TTC
cttaaacaaatgctacttga

SEQ ID NO: 25855 - DNA, 20 bp, Artificial Sequence
  Description of Artificial Sequence: Synthetic oligonucleotide
  Target: PCSK9; (+) strand; PAM type: YTN; PAM sequence: CTT
aaacaaatgctacttgacac

SEQ ID NO: 25856 - DNA, 20 bp, Artificial Sequence
  Description of Artificial Sequence: Synthetic oligonucleotide
  Target: PCSK9; (+) strand; PAM type: YTN; PAM sequence: TTA
aacaaatgctacttgacaca

SEQ ID NO: 25857 - DNA, 20 bp, Artificial Sequence
  Description of Artificial Sequence: Synthetic oligonucleotide
  Target: PCSK9; (+) strand; PAM type: YTN; PAM sequence: CTA
cttgacacagattagttctg

SEQ ID NO: 25858 - DNA, 20 bp, Artificial Sequence
  Description of Artificial Sequence: Synthetic oligonucleotide
  Target: PCSK9; (+) strand; PAM type: YTN; PAM sequence: CTT
gacacagattagttctggat

SEQ ID NO: 25859 - DNA, 20 bp, Artificial Sequence
  Description of Artificial Sequence: Synthetic oligonucleotide
  Target: PCSK9; (+) strand; PAM type: YTN; PAM sequence: TTG
acacagattagttctggata

SEQ ID NO: 25860 - DNA, 20 bp, Artificial Sequence
  Description of Artificial Sequence: Synthetic oligonucleotide
  Target: PCSK9; (+) strand; PAM type: YTN; PAM sequence: TTA
gttctggataggctgagagc

SEQ ID NO: 25861 - DNA, 20 bp, Artificial Sequence
  Description of Artificial Sequence: Synthetic oligonucleotide
  Target: PCSK9; (+) strand; PAM type: YTN; PAM sequence: TTC
tggataggctgagagctctg

SEQ ID NO: 25862 - DNA, 20 bp, Artificial Sequence
  Description of Artificial Sequence: Synthetic oligonucleotide
  Target: PCSK9; (+) strand; PAM type: YTN; PAM sequence: CTG
gataggctgagagctctgaa

SEQ ID NO: 25863 - DNA, 20 bp, Artificial Sequence
  Description of Artificial Sequence: Synthetic oligonucleotide
  Target: PCSK9; (+) strand; PAM type: YTN; PAM sequence: CTG
agagctctgaaggagtgcag

SEQ ID NO: 25864 - DNA, 20 bp, Artificial Sequence
  Description of Artificial Sequence: Synthetic oligonucleotide
  Target: PCSK9; (+) strand; PAM type: YTN; PAM sequence: CTC
tgaaggagtgcaggcagctg

SEQ ID NO: 25865 - DNA, 20 bp, Artificial Sequence
  Description of Artificial Sequence: Synthetic oligonucleotide
  Target: PCSK9; (+) strand; PAM type: YTN; PAM sequence: CTG
aaggagtgcaggcagctgcg

SEQ ID NO: 25866 - DNA, 20 bp, Artificial Sequence
  Description of Artificial Sequence: Synthetic oligonucleotide
  Target: PCSK9; (+) strand; PAM type: YTN; PAM sequence: CTG
cgagcctgtgtatccagcag

SEQ ID NO: 25867 - DNA, 20 bp, Artificial Sequence
  Description of Artificial Sequence: Synthetic oligonucleotide
  Target: PCSK9; (+) strand; PAM type: YTN; PAM sequence: CTG
tgtatccagcagaaggatca

SEQ ID NO: 25868 - DNA, 20 bp, Artificial Sequence
  Description of Artificial Sequence: Synthetic oligonucleotide
  Target: PCSK9; (+) strand; PAM type: YTN; PAM sequence: TTC
ctggaggaagcgctgttcta

SEQ ID NO: 25869 - DNA, 20 bp, Artificial Sequence
  Description of Artificial Sequence: Synthetic oligonucleotide
  Target: PCSK9; (+) strand; PAM type: YTN; PAM sequence: CTG
gaggaagcgctgttctagcc

SEQ ID NO: 25870 - DNA, 20 bp, Artificial Sequence
  Description of Artificial Sequence: Synthetic oligonucleotide
  Target: PCSK9; (+) strand; PAM type: YTN; PAM sequence: CTG
ttctagccaagacctacggg

SEQ ID NO: 25871 - DNA, 20 bp, Artificial Sequence
  Description of Artificial Sequence: Synthetic oligonucleotide
  Target: PCSK9; (+) strand; PAM type: YTN; PAM sequence: TTC
tagccaagacctacgggggc

SEQ ID NO: 25872 - DNA, 20 bp, Artificial Sequence
  Description of Artificial Sequence: Synthetic oligonucleotide
  Target: PCSK9; (+) strand; PAM type: YTN; PAM sequence: CTA
gccaagacctacgggggcat

SEQ ID NO: 25873 - DNA, 20 bp, Artificial Sequence
  Description of Artificial Sequence: Synthetic oligonucleotide
  Target: PCSK9; (+) strand; PAM type: YTN; PAM sequence: CTA
cgggggcattattaaccagg

SEQ ID NO: 25874 - DNA, 20 bp, Artificial Sequence
  Description of Artificial Sequence: Synthetic oligonucleotide
  Target: PCSK9; (+) strand; PAM type: YTN; PAM sequence: TTA
ttaaccaggcaaaggggacg

SEQ ID NO: 25875 - DNA, 20 bp, Artificial Sequence
  Description of Artificial Sequence: Synthetic oligonucleotide
  Target: PCSK9; (+) strand; PAM type: YTN; PAM sequence: TTA
accaggcaaaggggacggtg

SEQ ID NO: 25876 - DNA, 20 bp, Artificial Sequence
  Description of Artificial Sequence: Synthetic oligonucleotide
  Target: PCSK9; (+) strand; PAM type: YTN; PAM sequence: TTG
aagctgtgaggcaggaggga

SEQ ID NO: 25877 - DNA, 20 bp, Artificial Sequence
  Description of Artificial Sequence: Synthetic oligonucleotide
  Target: PCSK9; (+) strand; PAM type: YTN; PAM sequence: CTG
tgaggcaggagggagtgtgg

SEQ ID NO: 25878 - DNA, 20 bp, Artificial Sequence
  Description of Artificial Sequence: Synthetic oligonucleotide
  Target: PCSK9; (+) strand; PAM type: YTN; PAM sequence: CTG
tgcagaagggaccgaggctg

SEQ ID NO: 25879 - DNA, 20 bp, Artificial Sequence
  Description of Artificial Sequence: Synthetic oligonucleotide
  Target: PCSK9; (+) strand; PAM type: YTN; PAM sequence: CTG
gtgagaccaggagggcctgg

SEQ ID NO: 25880 - DNA, 20 bp, Artificial Sequence
  Description of Artificial Sequence: Synthetic oligonucleotide
  Target: PCSK9; (+) strand; PAM type: YTN; PAM sequence: CTG
ggtggcctccaggtcagatg

SEQ ID NO: 25881 - DNA, 20 bp, Artificial Sequence
  Description of Artificial Sequence: Synthetic oligonucleotide
  Target: PCSK9; (+) strand; PAM type: YTN; PAM sequence: CTC
caggtcagatgtgaaaggaa

SEQ ID NO: 25882 - DNA, 20 bp, Artificial Sequence
  Description of Artificial Sequence: Synthetic oligonucleotide
  Target: PCSK9; (+) strand; PAM type: YTN; PAM sequence: CTT
ggccacagtctgagcttctc

SEQ ID NO: 25883 - DNA, 20 bp, Artificial Sequence
  Description of Artificial Sequence: Synthetic oligonucleotide
  Target: PCSK9; (+) strand; PAM type: YTN; PAM sequence: TTG
gccacagtctgagcttctca

SEQ ID NO: 25884 - DNA, 20 bp, Artificial Sequence
  Description of Artificial Sequence: Synthetic oligonucleotide
  Target: PCSK9; (+) strand; PAM type: YTN; PAM sequence: CTG
agcttctcaggcgtatggca

SEQ ID NO: 25885 - DNA, 20 bp, Artificial Sequence
  Description of Artificial Sequence: Synthetic oligonucleotide
  Target: PCSK9; (+) strand; PAM type: YTN; PAM sequence: CTT
ctcaggcgtatggcagggct

SEQ ID NO: 25886 - DNA, 20 bp, Artificial Sequence
  Description of Artificial Sequence: Synthetic oligonucleotide
  Target: PCSK9; (+) strand; PAM type: YTN; PAM sequence: TTC
tcaggcgtatggcagggctg

SEQ ID NO: 25887 - DNA, 20 bp, Artificial Sequence
  Description of Artificial Sequence: Synthetic oligonucleotide
  Target: PCSK9; (+) strand; PAM type: YTN; PAM sequence: CTC
aggcgtatggcagggctgcc

SEQ ID NO: 25888 - DNA, 20 bp, Artificial Sequence
  Description of Artificial Sequence: Synthetic oligonucleotide
  Target: PCSK9; (+) strand; PAM type: YTN; PAM sequence: CTG
cctggtgagagggaatgagc

SEQ ID NO: 25889 - DNA, 20 bp, Artificial Sequence
  Description of Artificial Sequence: Synthetic oligonucleotide
  Target: PCSK9; (+) strand; PAM type: YTN; PAM sequence: CTG
gtgagagggaatgagctccc

SEQ ID NO: 25890 - DNA, 20 bp, Artificial Sequence
  Description of Artificial Sequence: Synthetic oligonucleotide
  Target: PCSK9; (+) strand; PAM type: YTN; PAM sequence: CTC
cctgctctggaggtatgcaa

SEQ ID NO: 25891 - DNA, 20 bp, Artificial Sequence
  Description of Artificial Sequence: Synthetic oligonucleotide
  Target: PCSK9; (+) strand; PAM type: YTN; PAM sequence: CTG
ctctggaggtatgcaagcag

SEQ ID NO: 25892 - DNA, 20 bp, Artificial Sequence
  Description of Artificial Sequence: Synthetic oligonucleotide
  Target: PCSK9; (+) strand; PAM type: YTN; PAM sequence: CTC
tggaggtatgcaagcaggac

SEQ ID NO: 25893 - DNA, 20 bp, Artificial Sequence
  Description of Artificial Sequence: Synthetic oligonucleotide
  Target: PCSK9; (+) strand; PAM type: YTN; PAM sequence: CTG
gaggtatgcaagcaggactg

SEQ ID NO: 25894 - DNA, 20 bp, Artificial Sequence
  Description of Artificial Sequence: Synthetic oligonucleotide
  Target: PCSK9; (+) strand; PAM type: YTN; PAM sequence: CTG
ggctctcacctgccagaggc

SEQ ID NO: 25895 - DNA, 20 bp, Artificial Sequence
  Description of Artificial Sequence: Synthetic oligonucleotide
  Target: PCSK9; (+) strand; PAM type: YTN; PAM sequence: CTC
tcacctgccagaggccacag

SEQ ID NO: 25896 - DNA, 20 bp, Artificial Sequence
  Description of Artificial Sequence: Synthetic oligonucleotide
  Target: PCSK9; (+) strand; PAM type: YTN; PAM sequence: CTC
acctgccagaggccacagag

SEQ ID NO: 25897 - DNA, 20 bp, Artificial Sequence
  Description of Artificial Sequence: Synthetic oligonucleotide
  Target: PCSK9; (+) strand; PAM type: YTN; PAM sequence: CTG
ccagaggccacagagctttc

SEQ ID NO: 25898 - DNA, 20 bp, Artificial Sequence
  Description of Artificial Sequence: Synthetic oligonucleotide
  Target: PCSK9; (+) strand; PAM type: YTN; PAM sequence: CTT
tccagaggctggaagaggcc

SEQ ID NO: 25899 - DNA, 20 bp, Artificial Sequence
  Description of Artificial Sequence: Synthetic oligonucleotide
  Target: PCSK9; (+) strand; PAM type: YTN; PAM sequence: TTT
ccagaggctggaagaggcca

SEQ ID NO: 25900 - DNA, 20 bp, Artificial Sequence
  Description of Artificial Sequence: Synthetic oligonucleotide
  Target: PCSK9; (+) strand; PAM type: YTN; PAM sequence: TTC
cagaggctggaagaggccac

SEQ ID NO: 25901 - DNA, 20 bp, Artificial Sequence
  Description of Artificial Sequence: Synthetic oligonucleotide
  Target: PCSK9; (+) strand; PAM type: YTN; PAM sequence: CTG
gaagaggccactccaaggcc

SEQ ID NO: 25902 - DNA, 20 bp, Artificial Sequence
  Description of Artificial Sequence: Synthetic oligonucleotide
  Target: PCSK9; (+) strand; PAM type: YTN; PAM sequence: CTC
caaggcctctttgcccctga

SEQ ID NO: 25903 - DNA, 20 bp, Artificial Sequence
  Description of Artificial Sequence: Synthetic oligonucleotide
  Target: PCSK9; (+) strand; PAM type: YTN; PAM sequence: CTC
tttgcccctgagagtggtgg

SEQ ID NO: 25904 - DNA, 20 bp, Artificial Sequence
  Description of Artificial Sequence: Synthetic oligonucleotide
  Target: PCSK9; (+) strand; PAM type: YTN; PAM sequence: CTT
tgcccctgagagtggtggct

SEQ ID NO: 25905 - DNA, 20 bp, Artificial Sequence
  Description of Artificial Sequence: Synthetic oligonucleotide
  Target: PCSK9; (+) strand; PAM type: YTN; PAM sequence: TTT
gcccctgagagtggtggctc

SEQ ID NO: 25906 - DNA, 20 bp, Artificial Sequence
  Description of Artificial Sequence: Synthetic oligonucleotide
  Target: PCSK9; (+) strand; PAM type: YTN; PAM sequence: TTG
cccctgagagtggtggctct

SEQ ID NO: 25907 - DNA, 20 bp, Artificial Sequence
  Description of Artificial Sequence: Synthetic oligonucleotide
  Target: PCSK9; (+) strand; PAM type: YTN; PAM sequence: CTG
agagtggtggctcttcttga

SEQ ID NO: 25908 - DNA, 20 bp, Artificial Sequence
  Description of Artificial Sequence: Synthetic oligonucleotide
  Target: PCSK9; (+) strand; PAM type: YTN; PAM sequence: CTC
ttcttgaggccaccttgcca

SEQ ID NO: 25909 - DNA, 20 bp, Artificial Sequence
  Description of Artificial Sequence: Synthetic oligonucleotide
  Target: PCSK9; (+) strand; PAM type: YTN; PAM sequence: CTT
cttgaggccaccttgccacg

SEQ ID NO: 25910 - DNA, 20 bp, Artificial Sequence
  Description of Artificial Sequence: Synthetic oligonucleotide
  Target: PCSK9; (+) strand; PAM type: YTN; PAM sequence: TTC
ttgaggccaccttgccacgc

SEQ ID NO: 25911 - DNA, 20 bp, Artificial Sequence
  Description of Artificial Sequence: Synthetic oligonucleotide
  Target: PCSK9; (+) strand; PAM type: YTN; PAM sequence: CTT
gaggccaccttgccacgctg

SEQ ID NO: 25912 - DNA, 20 bp, Artificial Sequence
  Description of Artificial Sequence: Synthetic oligonucleotide
  Target: PCSK9; (+) strand; PAM type: YTN; PAM sequence: TTG
aggccaccttgccacgctgt

SEQ ID NO: 25913 - DNA, 20 bp, Artificial Sequence
  Description of Artificial Sequence: Synthetic oligonucleotide
  Target: PCSK9; (+) strand; PAM type: YTN; PAM sequence: CTT
gccacgctgtcacagggaac

SEQ ID NO: 25914 - DNA, 20 bp, Artificial Sequence
  Description of Artificial Sequence: Synthetic oligonucleotide
  Target: PCSK9; (+) strand; PAM type: YTN; PAM sequence: TTG
ccacgctgtcacagggaact

SEQ ID NO: 25915 - DNA, 20 bp, Artificial Sequence
  Description of Artificial Sequence: Synthetic oligonucleotide
  Target: PCSK9; (+) strand; PAM type: YTN; PAM sequence: CTG
tcacagggaactagcagccc

SEQ ID NO: 25916 - DNA, 20 bp, Artificial Sequence
  Description of Artificial Sequence: Synthetic oligonucleotide
  Target: PCSK9; (+) strand; PAM type: YTN; PAM sequence: CTA
gcagcccctgcctcacccgg

SEQ ID NO: 25917 - DNA, 20 bp, Artificial Sequence
  Description of Artificial Sequence: Synthetic oligonucleotide
  Target: PCSK9; (+) strand; PAM type: YTN; PAM sequence: CTG
cctcacccgggggtttggaa

SEQ ID NO: 25918 - DNA, 20 bp, Artificial Sequence
  Description of Artificial Sequence: Synthetic oligonucleotide
  Target: PCSK9; (+) strand; PAM type: YTN; PAM sequence: CTC
acccgggggtttggaagata

SEQ ID NO: 25919 - DNA, 20 bp, Artificial Sequence
  Description of Artificial Sequence: Synthetic oligonucleotide
  Target: PCSK9; (+) strand; PAM type: YTN; PAM sequence: TTT
ggaagatagagggaggccta

SEQ ID NO: 25920 - DNA, 20 bp, Artificial Sequence
  Description of Artificial Sequence: Synthetic oligonucleotide
  Target: PCSK9; (+) strand; PAM type: YTN; PAM sequence: TTG
gaagatagagggaggcctag

SEQ ID NO: 25921 - DNA, 20 bp, Artificial Sequence
  Description of Artificial Sequence: Synthetic oligonucleotide
  Target: PCSK9; (+) strand; PAM type: YTN; PAM sequence: CTA
ggaagggccctgtgtctcat

SEQ ID NO: 25922 - DNA, 20 bp, Artificial Sequence
  Description of Artificial Sequence: Synthetic oligonucleotide
  Target: PCSK9; (+) strand; PAM type: YTN; PAM sequence: CTG
tgtctcatccgagctgggcc

SEQ ID NO: 25923 - DNA, 20 bp, Artificial Sequence
  Description of Artificial Sequence: Synthetic oligonucleotide
  Target: PCSK9; (+) strand; PAM type: YTN; PAM sequence: CTC
atccgagctgggcccctttc

SEQ ID NO: 25924 - DNA, 20 bp, Artificial Sequence
  Description of Artificial Sequence: Synthetic oligonucleotide
  Target: PCSK9; (+) strand; PAM type: YTN; PAM sequence: CTG
ggcccctttccagcctctca

SEQ ID NO: 25925 - DNA, 20 bp, Artificial Sequence
  Description of Artificial Sequence: Synthetic oligonucleotide
  Target: PCSK9; (+) strand; PAM type: YTN; PAM sequence: CTT
tccagcctctcactggaagg

SEQ ID NO: 25926 - DNA, 20 bp, Artificial Sequence
  Description of Artificial Sequence: Synthetic oligonucleotide
  Target: PCSK9; (+) strand; PAM type: YTN; PAM sequence: TTT
ccagcctctcactggaagga

SEQ ID NO: 25927 - DNA, 20 bp, Artificial Sequence
  Description of Artificial Sequence: Synthetic oligonucleotide
  Target: PCSK9; (+) strand; PAM type: YTN; PAM sequence: TTC
cagcctctcactggaaggaa

SEQ ID NO: 25928 - DNA, 20 bp, Artificial Sequence
  Description of Artificial Sequence: Synthetic oligonucleotide
  Target: PCSK9; (+) strand; PAM type: YTN; PAM sequence: CTC
tcactggaaggaagcccaag

SEQ ID NO: 25929 - DNA, 20 bp, Artificial Sequence
  Description of Artificial Sequence: Synthetic oligonucleotide
  Target: PCSK9; (+) strand; PAM type: YTN; PAM sequence: CTC
actggaaggaagcccaagga

SEQ ID NO: 25930 - DNA, 20 bp, Artificial Sequence
  Description of Artificial Sequence: Synthetic oligonucleotide
  Target: PCSK9; (+) strand; PAM type: YTN; PAM sequence: CTG
gaaggaagcccaaggatgtt

SEQ ID NO: 25931 - DNA, 20 bp, Artificial Sequence
  Description of Artificial Sequence: Synthetic oligonucleotide
  Target: PCSK9; (+) strand; PAM type: YTN; PAM sequence: TTC
ctgtgggggcttttaccagg

SEQ ID NO: 25932 - DNA, 20 bp, Artificial Sequence
  Description of Artificial Sequence: Synthetic oligonucleotide
  Target: PCSK9; (+) strand; PAM type: YTN; PAM sequence: CTG
tgggggcttttaccaggccc

SEQ ID NO: 25933 - DNA, 20 bp, Artificial Sequence
  Description of Artificial Sequence: Synthetic oligonucleotide
  Target: PCSK9; (+) strand; PAM type: YTN; PAM sequence: CTT
ttaccaggcccacctgccct

SEQ ID NO: 25934 - DNA, 20 bp, Artificial Sequence
  Description of Artificial Sequence: Synthetic oligonucleotide
  Target: PCSK9; (+) strand; PAM type: YTN; PAM sequence: TTT
taccaggcccacctgccctc

SEQ ID NO: 25935 - DNA, 20 bp, Artificial Sequence
  Description of Artificial Sequence: Synthetic oligonucleotide
  Target: PCSK9; (+) strand; PAM type: YTN; PAM sequence: TTT
accaggcccacctgccctct

SEQ ID NO: 25936 - DNA, 20 bp, Artificial Sequence
  Description of Artificial Sequence: Synthetic oligonucleotide
  Target: PCSK9; (+) strand; PAM type: YTN; PAM sequence: TTA
ccaggcccacctgccctctg

SEQ ID NO: 25937 - DNA, 20 bp, Artificial Sequence
  Description of Artificial Sequence: Synthetic oligonucleotide
  Target: PCSK9; (+) strand; PAM type: YTN; PAM sequence: CTG
ccctctgctggccatgcttg

SEQ ID NO: 25938 - DNA, 20 bp, Artificial Sequence
  Description of Artificial Sequence: Synthetic oligonucleotide
  Target: PCSK9; (+) strand; PAM type: YTN; PAM sequence: CTC
tgctggccatgcttgcagcc

SEQ ID NO: 25939 - DNA, 20 bp, Artificial Sequence
  Description of Artificial Sequence: Synthetic oligonucleotide
  Target: PCSK9; (+) strand; PAM type: YTN; PAM sequence: CTG
ctggccatgcttgcagcctc

SEQ ID NO: 25940 - DNA, 20 bp, Artificial Sequence
  Description of Artificial Sequence: Synthetic oligonucleotide
  Target: PCSK9; (+) strand; PAM type: YTN; PAM sequence: CTG
gccatgcttgcagcctcctg

SEQ ID NO: 25941 - DNA, 20 bp, Artificial Sequence
  Description of Artificial Sequence: Synthetic oligonucleotide
  Target: PCSK9; (+) strand; PAM type: YTN; PAM sequence: CTT
gcagcctcctgaccctgtcc

SEQ ID NO: 25942 - DNA, 20 bp, Artificial Sequence
  Description of Artificial Sequence: Synthetic oligonucleotide
  Target: PCSK9; (+) strand; PAM type: YTN; PAM sequence: TTG
cagcctcctgaccctgtccc

SEQ ID NO: 25943 - DNA, 20 bp, Artificial Sequence
  Description of Artificial Sequence: Synthetic oligonucleotide
  Target: PCSK9; (+) strand; PAM type: YTN; PAM sequence: CTC
ctgaccctgtcccagcagga

SEQ ID NO: 25944 - DNA, 20 bp, Artificial Sequence
  Description of Artificial Sequence: Synthetic oligonucleotide
  Target: PCSK9; (+) strand; PAM type: YTN; PAM sequence: CTG
accctgtcccagcaggacag

SEQ ID NO: 25945 - DNA, 20 bp, Artificial Sequence
  Description of Artificial Sequence: Synthetic oligonucleotide
  Target: PCSK9; (+) strand; PAM type: YTN; PAM sequence: CTG
tcccagcaggacagtgggct

SEQ ID NO: 25946 - DNA, 20 bp, Artificial Sequence
  Description of Artificial Sequence: Synthetic oligonucleotide
  Target: PCSK9; (+) strand; PAM type: YTN; PAM sequence: CTG
gtgtgagcgggcaggaaccg

SEQ ID NO: 25947 - DNA, 20 bp, Artificial Sequence
  Description of Artificial Sequence: Synthetic oligonucleotide
  Target: PCSK9; (+) strand; PAM type: YTN; PAM sequence: CTG
cacttagaaggtgtggggct

SEQ ID NO: 25948 - DNA, 20 bp, Artificial Sequence
  Description of Artificial Sequence: Synthetic oligonucleotide
  Target: PCSK9; (+) strand; PAM type: YTN; PAM sequence: CTT
agaaggtgtggggctgcctc

SEQ ID NO: 25949 - DNA, 20 bp, Artificial Sequence
  Description of Artificial Sequence: Synthetic oligonucleotide
  Target: PCSK9; (+) strand; PAM type: YTN; PAM sequence: TTA
gaaggtgtggggctgcctcc

SEQ ID NO: 25950 - DNA, 20 bp, Artificial Sequence
  Description of Artificial Sequence: Synthetic oligonucleotide
  Target: PCSK9; (+) strand; PAM type: YTN; PAM sequence: CTG
cctccccgagcttccatctg

SEQ ID NO: 25951 - DNA, 20 bp, Artificial Sequence
  Description of Artificial Sequence: Synthetic oligonucleotide
  Target: PCSK9; (+) strand; PAM type: YTN; PAM sequence: CTC
cccgagcttccatctgccgc

SEQ ID NO: 25952 - DNA, 20 bp, Artificial Sequence
  Description of Artificial Sequence: Synthetic oligonucleotide
  Target: PCSK9; (+) strand; PAM type: YTN; PAM sequence: CTT
ccatctgccgctggggccac

SEQ ID NO: 25953 - DNA, 20 bp, Artificial Sequence
  Description of Artificial Sequence: Synthetic oligonucleotide
  Target: PCSK9; (+) strand; PAM type: YTN; PAM sequence: TTC
catctgccgctggggccaca

SEQ ID NO: 25954 - DNA, 20 bp, Artificial Sequence
  Description of Artificial Sequence: Synthetic oligonucleotide
  Target: PCSK9; (+) strand; PAM type: YTN; PAM sequence: CTG
ccgctggggccacaccccag

SEQ ID NO: 25955 - DNA, 20 bp, Artificial Sequence
  Description of Artificial Sequence: Synthetic oligonucleotide
  Target: PCSK9; (+) strand; PAM type: YTN; PAM sequence: CTG
gggccacaccccaggcccag

SEQ ID NO: 25956 - DNA, 20 bp, Artificial Sequence
  Description of Artificial Sequence: Synthetic oligonucleotide
  Target: PCSK9; (+) strand; PAM type: YTN; PAM sequence: CTT
gcagcagaacccaggtacag

SEQ ID NO: 25957 - DNA, 20 bp, Artificial Sequence
  Description of Artificial Sequence: Synthetic oligonucleotide
  Target: PCSK9; (+) strand; PAM type: YTN; PAM sequence: TTG
cagcagaacccaggtacagc

SEQ ID NO: 25958 - DNA, 20 bp, Artificial Sequence
  Description of Artificial Sequence: Synthetic oligonucleotide
  Target: PCSK9; (+) strand; PAM type: YTN; PAM sequence: CTC
ctggagcagatggtggtccc

SEQ ID NO: 25959 - DNA, 20 bp, Artificial Sequence
  Description of Artificial Sequence: Synthetic oligonucleotide
  Target: PCSK9; (+) strand; PAM type: YTN; PAM sequence: CTG
gagcagatggtggtcccaag

SEQ ID NO: 25960 - DNA, 20 bp, Artificial Sequence
  Description of Artificial Sequence: Synthetic oligonucleotide
  Target: PCSK9; (+) strand; PAM type: YTN; PAM sequence: CTC
tcacctgggctaactcagct

SEQ ID NO: 25961 - DNA, 20 bp, Artificial Sequence
  Description of Artificial Sequence: Synthetic oligonucleotide
  Target: PCSK9; (+) strand; PAM type: YTN; PAM sequence: CTC
acctgggctaactcagctgc

SEQ ID NO: 25962 - DNA, 20 bp, Artificial Sequence
  Description of Artificial Sequence: Synthetic oligonucleotide
  Target: PCSK9; (+) strand; PAM type: YTN; PAM sequence: CTG
ggctaactcagctgcagcct

SEQ ID NO: 25963 - DNA, 20 bp, Artificial Sequence
  Description of Artificial Sequence: Synthetic oligonucleotide
  Target: PCSK9; (+) strand; PAM type: YTN; PAM sequence: CTA
actcagctgcagcctcagtt

SEQ ID NO: 25964 - DNA, 20 bp, Artificial Sequence
  Description of Artificial Sequence: Synthetic oligonucleotide
  Target: PCSK9; (+) strand; PAM type: YTN; PAM sequence: CTC
agctgcagcctcagttccct

SEQ ID NO: 25965 - DNA, 20 bp, Artificial Sequence
  Description of Artificial Sequence: Synthetic oligonucleotide
  Target: PCSK9; (+) strand; PAM type: YTN; PAM sequence: CTG
cagcctcagttccctcctca

SEQ ID NO: 25966 - DNA, 20 bp, Artificial Sequence
  Description of Artificial Sequence: Synthetic oligonucleotide
  Target: PCSK9; (+) strand; PAM type: YTN; PAM sequence: CTC
agttccctcctcacacacga

SEQ ID NO: 25967 - DNA, 20 bp, Artificial Sequence
  Description of Artificial Sequence: Synthetic oligonucleotide
  Target: PCSK9; (+) strand; PAM type: YTN; PAM sequence: TTC
cctcctcacacacgacgagg

SEQ ID NO: 25968 - DNA, 20 bp, Artificial Sequence
  Description of Artificial Sequence: Synthetic oligonucleotide
  Target: PCSK9; (+) strand; PAM type: YTN; PAM sequence: CTC
ctcacacacgacgaggaaca

SEQ ID NO: 25969 - DNA, 20 bp, Artificial Sequence
  Description of Artificial Sequence: Synthetic oligonucleotide
  Target: PCSK9; (+) strand; PAM type: YTN; PAM sequence: CTC
acacacgacgaggaacatgg

SEQ ID NO: 25970 - DNA, 20 bp, Artificial Sequence
  Description of Artificial Sequence: Synthetic oligonucleotide
  Target: PCSK9; (+) strand; PAM type: YTN; PAM sequence: CTG
gaagcctgcccagcaggcct

SEQ ID NO: 25971 - DNA, 20 bp, Artificial Sequence
  Description of Artificial Sequence: Synthetic oligonucleotide
  Target: PCSK9; (+) strand; PAM type: YTN; PAM sequence: CTG
cccagcaggccttctgctcg

SEQ ID NO: 25972 - DNA, 20 bp, Artificial Sequence
  Description of Artificial Sequence: Synthetic oligonucleotide
  Target: PCSK9; (+) strand; PAM type: YTN; PAM sequence: CTT
ctgctcgatgtgcgttgtgt

SEQ ID NO: 25973 - DNA, 20 bp, Artificial Sequence
  Description of Artificial Sequence: Synthetic oligonucleotide
  Target: PCSK9; (+) strand; PAM type: YTN; PAM sequence: TTC
tgctcgatgtgcgttgtgtg

SEQ ID NO: 25974 - DNA, 20 bp, Artificial Sequence
  Description of Artificial Sequence: Synthetic oligonucleotide
  Target: PCSK9; (+) strand; PAM type: YTN; PAM sequence: CTG
ctcgatgtgcgttgtgtggc

SEQ ID NO: 25975 - DNA, 20 bp, Artificial Sequence
  Description of Artificial Sequence: Synthetic oligonucleotide
  Target: PCSK9; (+) strand; PAM type: YTN; PAM sequence: CTC
gatgtgcgttgtgtggctta

SEQ ID NO: 25976 - DNA, 20 bp, Artificial Sequence
  Description of Artificial Sequence: Synthetic oligonucleotide
  Target: PCSK9; (+) strand; PAM type: YTN; PAM sequence: TTG
tgtggcttacgtccagggag

SEQ ID NO: 25977 - DNA, 20 bp, Artificial Sequence
  Description of Artificial Sequence: Synthetic oligonucleotide
  Target: PCSK9; (+) strand; PAM type: YTN; PAM sequence: CTT
acgtccagggagggaagcag

SEQ ID NO: 25978 - DNA, 20 bp, Artificial Sequence
  Description of Artificial Sequence: Synthetic oligonucleotide
  Target: PCSK9; (+) strand; PAM type: YTN; PAM sequence: TTA
cgtccagggagggaagcagc

SEQ ID NO: 25979 - DNA, 20 bp, Artificial Sequence
  Description of Artificial Sequence: Synthetic oligonucleotide
  Target: PCSK9; (+) strand; PAM type: YTN; PAM sequence: CTC
tgtgctgtcttctagataag

SEQ ID NO: 25980 - DNA, 20 bp, Artificial Sequence
  Description of Artificial Sequence: Synthetic oligonucleotide
  Target: PCSK9; (+) strand; PAM type: YTN; PAM sequence: CTG
tgctgtcttctagataagcc

SEQ ID NO: 25981 - DNA, 20 bp, Artificial Sequence
  Description of Artificial Sequence: Synthetic oligonucleotide
  Target: PCSK9; (+) strand; PAM type: YTN; PAM sequence: CTG
tcttctagataagcctgtat

SEQ ID NO: 25982 - DNA, 20 bp, Artificial Sequence
  Description of Artificial Sequence: Synthetic oligonucleotide
  Target: PCSK9; (+) strand; PAM type: YTN; PAM sequence: CTT
ctagataagcctgtattccc

SEQ ID NO: 25983 - DNA, 20 bp, Artificial Sequence
  Description of Artificial Sequence: Synthetic oligonucleotide
  Target: PCSK9; (+) strand; PAM type: YTN; PAM sequence: TTC
tagataagcctgtattcccc

SEQ ID NO: 25984 - DNA, 20 bp, Artificial Sequence
  Description of Artificial Sequence: Synthetic oligonucleotide
  Target: PCSK9; (+) strand; PAM type: YTN; PAM sequence: CTA
gataagcctgtattccccgg

SEQ ID NO: 25985 - DNA, 20 bp, Artificial Sequence
  Description of Artificial Sequence: Synthetic oligonucleotide
  Target: PCSK9; (+) strand; PAM type: YTN; PAM sequence: CTG
tattccccgggctgtctgcc

SEQ ID NO: 25986 - DNA, 20 bp, Artificial Sequence
  Description of Artificial Sequence: Synthetic oligonucleotide
  Target: PCSK9; (+) strand; PAM type: YTN; PAM sequence: TTC
cccgggctgtctgccaatgt

SEQ ID NO: 25987 - DNA, 20 bp, Artificial Sequence
  Description of Artificial Sequence: Synthetic oligonucleotide
  Target: PCSK9; (+) strand; PAM type: YTN; PAM sequence: CTG
tctgccaatgtatccagttg

SEQ ID NO: 25988 - DNA, 20 bp, Artificial Sequence
  Description of Artificial Sequence: Synthetic oligonucleotide
  Target: PCSK9; (+) strand; PAM type: YTN; PAM sequence: CTG
ccaatgtatccagttgtccc

SEQ ID NO: 25989 - DNA, 20 bp, Artificial Sequence
  Description of Artificial Sequence: Synthetic oligonucleotide
  Target: PCSK9; (+) strand; PAM type: YTN; PAM sequence: TTG
tcccgtcagcctggaagctc

SEQ ID NO: 25990 - DNA, 20 bp, Artificial Sequence
  Description of Artificial Sequence: Synthetic oligonucleotide
  Target: PCSK9; (+) strand; PAM type: YTN; PAM sequence: CTG
gaagctctgagggaaaacct

SEQ ID NO: 25991 - DNA, 20 bp, Artificial Sequence
  Description of Artificial Sequence: Synthetic oligonucleotide
  Target: PCSK9; (+) strand; PAM type: YTN; PAM sequence: CTC
tgagggaaaaccttgggctg

SEQ ID NO: 25992 - DNA, 20 bp, Artificial Sequence
  Description of Artificial Sequence: Synthetic oligonucleotide
  Target: PCSK9; (+) strand; PAM type: YTN; PAM sequence: CTG
agggaaaaccttgggctgct

SEQ ID NO: 25993 - DNA, 20 bp, Artificial Sequence
  Description of Artificial Sequence: Synthetic oligonucleotide
  Target: PCSK9; (+) strand; PAM type: YTN; PAM sequence: CTT
gggctgcttcctgagcacct

SEQ ID NO: 25994 - DNA, 20 bp, Artificial Sequence
  Description of Artificial Sequence: Synthetic oligonucleotide
  Target: PCSK9; (+) strand; PAM type: YTN; PAM sequence: TTG
ggctgcttcctgagcacctg

SEQ ID NO: 25995 - DNA, 20 bp, Artificial Sequence
  Description of Artificial Sequence: Synthetic oligonucleotide
  Target: PCSK9; (+) strand; PAM type: YTN; PAM sequence: CTG
cttcctgagcacctgtatcc

SEQ ID NO: 25996 - DNA, 20 bp, Artificial Sequence
  Description of Artificial Sequence: Synthetic oligonucleotide
  Target: PCSK9; (+) strand; PAM type: YTN; PAM sequence: CTT
cctgagcacctgtatcccct

SEQ ID NO: 25997 - DNA, 20 bp, Artificial Sequence
  Description of Artificial Sequence: Synthetic oligonucleotide
  Target: PCSK9; (+) strand; PAM type: YTN; PAM sequence: TTC
ctgagcacctgtatcccctg

SEQ ID NO: 25998 - DNA, 20 bp, Artificial Sequence
  Description of Artificial Sequence: Synthetic oligonucleotide
  Target: PCSK9; (+) strand; PAM type: YTN; PAM sequence: CTG
agcacctgtatcccctgcag

SEQ ID NO: 25999 - DNA, 20 bp, Artificial Sequence
  Description of Artificial Sequence: Synthetic oligonucleotide
  Target: PCSK9; (+) strand; PAM type: YTN; PAM sequence: CTG
tatcccctgcagccagcccg

SEQ ID NO: 26000 - DNA, 20 bp, Artificial Sequence
  Description of Artificial Sequence: Synthetic oligonucleotide
  Target: PCSK9; (+) strand; PAM type: YTN; PAM sequence: CTG
cagccagcccggggcctctg

SEQ ID NO: 26001 - DNA, 20 bp, Artificial Sequence
  Description of Artificial Sequence: Synthetic oligonucleotide
  Target: PCSK9; (+) strand; PAM type: YTN; PAM sequence: CTC
tgctaggagcagactgagca

SEQ ID NO: 26002 - DNA, 20 bp, Artificial Sequence
  Description of Artificial Sequence: Synthetic oligonucleotide
  Target: PCSK9; (+) strand; PAM type: YTN; PAM sequence: CTG
ctaggagcagactgagcatg

SEQ ID NO: 26003 - DNA, 20 bp, Artificial Sequence
  Description of Artificial Sequence: Synthetic oligonucleotide
  Target: PCSK9; (+) strand; PAM type: YTN; PAM sequence: CTA
ggagcagactgagcatggct

SEQ ID NO: 26004 - DNA, 20 bp, Artificial Sequence
  Description of Artificial Sequence: Synthetic oligonucleotide
  Target: PCSK9; (+) strand; PAM type: YTN; PAM sequence: CTG
agcatggcttatgggcctgg

SEQ ID NO: 26005 - DNA, 20 bp, Artificial Sequence
  Description of Artificial Sequence: Synthetic oligonucleotide
  Target: PCSK9; (+) strand; PAM type: YTN; PAM sequence: CTT
atgggcctggcaccatctgg

SEQ ID NO: 26006 - DNA, 20 bp, Artificial Sequence
  Description of Artificial Sequence: Synthetic oligonucleotide
  Target: PCSK9; (+) strand; PAM type: YTN; PAM sequence: TTA
tgggcctggcaccatctggc

SEQ ID NO: 26007 - DNA, 20 bp, Artificial Sequence
  Description of Artificial Sequence: Synthetic oligonucleotide
  Target: PCSK9; (+) strand; PAM type: YTN; PAM sequence: CTG
gcaccatctggcctctgccc

SEQ ID NO: 26008 - DNA, 20 bp, Artificial Sequence
  Description of Artificial Sequence: Synthetic oligonucleotide
  Target: PCSK9; (+) strand; PAM type: YTN; PAM sequence: CTG
gcctctgcccaccttgctgg

SEQ ID NO: 26009 - DNA, 20 bp, Artificial Sequence
  Description of Artificial Sequence: Synthetic oligonucleotide
  Target: PCSK9; (+) strand; PAM type: YTN; PAM sequence: CTC
tgcccaccttgctggccttg

SEQ ID NO: 26010 - DNA, 20 bp, Artificial Sequence
  Description of Artificial Sequence: Synthetic oligonucleotide
  Target: PCSK9; (+) strand; PAM type: YTN; PAM sequence: CTG
cccaccttgctggccttgtc

SEQ ID NO: 26011 - DNA, 20 bp, Artificial Sequence
  Description of Artificial Sequence: Synthetic oligonucleotide
  Target: PCSK9; (+) strand; PAM type: YTN; PAM sequence: CTT
gctggccttgtcttgtgtct

SEQ ID NO: 26012 - DNA, 20 bp, Artificial Sequence
  Description of Artificial Sequence: Synthetic oligonucleotide
  Target: PCSK9; (+) strand; PAM type: YTN; PAM sequence: TTG
ctggccttgtcttgtgtctg

SEQ ID NO: 26013 - DNA, 20 bp, Artificial Sequence
  Description of Artificial Sequence: Synthetic oligonucleotide
  Target: PCSK9; (+) strand; PAM type: YTN; PAM sequence: CTG
gccttgtcttgtgtctgccc

SEQ ID NO: 26014 - DNA, 20 bp, Artificial Sequence
  Description of Artificial Sequence: Synthetic oligonucleotide
  Target: PCSK9; (+) strand; PAM type: YTN; PAM sequence: CTT
gtcttgtgtctgccccttcg

SEQ ID NO: 26015 - DNA, 20 bp, Artificial Sequence
  Description of Artificial Sequence: Synthetic oligonucleotide
  Target: PCSK9; (+) strand; PAM type: YTN; PAM sequence: TTG
tcttgtgtctgccccttcga

SEQ ID NO: 26016 - DNA, 20 bp, Artificial Sequence
  Description of Artificial Sequence: Synthetic oligonucleotide
  Target: PCSK9; (+) strand; PAM type: YTN; PAM sequence: CTT
gtgtctgccccttcgacatt

SEQ ID NO: 26017 - DNA, 20 bp, Artificial Sequence
  Description of Artificial Sequence: Synthetic oligonucleotide
  Target: PCSK9; (+) strand; PAM type: YTN; PAM sequence: TTG
tgtctgccccttcgacattc

SEQ ID NO: 26018 - DNA, 20 bp, Artificial Sequence
  Description of Artificial Sequence: Synthetic oligonucleotide
  Target: PCSK9; (+) strand; PAM type: YTN; PAM sequence: CTG
ccccttcgacattccatagc

SEQ ID NO: 26019 - DNA, 20 bp, Artificial Sequence
  Description of Artificial Sequence: Synthetic oligonucleotide
  Target: PCSK9; (+) strand; PAM type: YTN; PAM sequence: CTT
cgacattccatagcccagct

SEQ ID NO: 26020 - DNA, 20 bp, Artificial Sequence
  Description of Artificial Sequence: Synthetic oligonucleotide
  Target: PCSK9; (+) strand; PAM type: YTN; PAM sequence: TTC
gacattccatagcccagctc

SEQ ID NO: 26021 - DNA, 20 bp, Artificial Sequence
  Description of Artificial Sequence: Synthetic oligonucleotide
  Target: PCSK9; (+) strand; PAM type: YTN; PAM sequence: TTC
catagcccagctcaatatct

SEQ ID NO: 26022 - DNA, 20 bp, Artificial Sequence
  Description of Artificial Sequence: Synthetic oligonucleotide
  Target: PCSK9; (+) strand; PAM type: YTN; PAM sequence: CTC
aatatctagtggttcctcta

SEQ ID NO: 26023 - DNA, 20 bp, Artificial Sequence
  Description of Artificial Sequence: Synthetic oligonucleotide
  Target: PCSK9; (+) strand; PAM type: YTN; PAM sequence: CTA
gtggttcctctagggtggcg

SEQ ID NO: 26024 - DNA, 20 bp, Artificial Sequence
  Description of Artificial Sequence: Synthetic oligonucleotide
  Target: PCSK9; (+) strand; PAM type: YTN; PAM sequence: TTC
ctctagggtggcgagcactg

SEQ ID NO: 26025 - DNA, 20 bp, Artificial Sequence
  Description of Artificial Sequence: Synthetic oligonucleotide
  Target: PCSK9; (+) strand; PAM type: YTN; PAM sequence: CTC
tagggtggcgagcactgttt

SEQ ID NO: 26026 - DNA, 20 bp, Artificial Sequence
  Description of Artificial Sequence: Synthetic oligonucleotide
  Target: PCSK9; (+) strand; PAM type: YTN; PAM sequence: CTA
gggtggcgagcactgtttgg

SEQ ID NO: 26027 - DNA, 20 bp, Artificial Sequence
  Description of Artificial Sequence: Synthetic oligonucleotide
  Target: PCSK9; (+) strand; PAM type: YTN; PAM sequence: CTG
tttggtctccagatgtcttc

SEQ ID NO: 26028 - DNA, 20 bp, Artificial Sequence
  Description of Artificial Sequence: Synthetic oligonucleotide
  Target: PCSK9; (+) strand; PAM type: YTN; PAM sequence: TTT
ggtctccagatgtcttcagg

SEQ ID NO: 26029 - DNA, 20 bp, Artificial Sequence
  Description of Artificial Sequence: Synthetic oligonucleotide
  Target: PCSK9; (+) strand; PAM type: YTN; PAM sequence: TTG
gtctccagatgtcttcaggt

SEQ ID NO: 26030 - DNA, 20 bp, Artificial Sequence
  Description of Artificial Sequence: Synthetic oligonucleotide
  Target: PCSK9; (+) strand; PAM type: YTN; PAM sequence: CTC
cagatgtcttcaggtcggag

SEQ ID NO: 26031 - DNA, 20 bp, Artificial Sequence
  Description of Artificial Sequence: Synthetic oligonucleotide
  Target: PCSK9; (+) strand; PAM type: YTN; PAM sequence: CTT
caggtcggagctcacagcgc

SEQ ID NO: 26032 - DNA, 20 bp, Artificial Sequence
  Description of Artificial Sequence: Synthetic oligonucleotide
  Target: PCSK9; (+) strand; PAM type: YTN; PAM sequence: TTC
aggtcggagctcacagcgct

SEQ ID NO: 26033 - DNA, 20 bp, Artificial Sequence
  Description of Artificial Sequence: Synthetic oligonucleotide
  Target: PCSK9; (+) strand; PAM type: YTN; PAM sequence: CTC
acagcgctctcagccacccc

SEQ ID NO: 26034 - DNA, 20 bp, Artificial Sequence
  Description of Artificial Sequence: Synthetic oligonucleotide
  Target: PCSK9; (+) strand; PAM type: YTN; PAM sequence: CTC
tcagccaccccttcccagtg

SEQ ID NO: 26035 - DNA, 20 bp, Artificial Sequence
  Description of Artificial Sequence: Synthetic oligonucleotide
  Target: PCSK9; (+) strand; PAM type: YTN; PAM sequence: CTC
agccaccccttcccagtgta

SEQ ID NO: 26036 - DNA, 20 bp, Artificial Sequence
  Description of Artificial Sequence: Synthetic oligonucleotide
  Target: PCSK9; (+) strand; PAM type: YTN; PAM sequence: CTT
cccagtgtagcaccgggcac

SEQ ID NO: 26037 - DNA, 20 bp, Artificial Sequence
  Description of Artificial Sequence: Synthetic oligonucleotide
  Target: PCSK9; (+) strand; PAM type: YTN; PAM sequence: TTC
ccagtgtagcaccgggcaca

SEQ ID NO: 26038 - DNA, 20 bp, Artificial Sequence
  Description of Artificial Sequence: Synthetic oligonucleotide
  Target: PCSK9; (+) strand; PAM type: YTN; PAM sequence: CTA
ttgatgagtgaaagctccta

SEQ ID NO: 26039 - DNA, 20 bp, Artificial Sequence
  Description of Artificial Sequence: Synthetic oligonucleotide
  Target: PCSK9; (+) strand; PAM type: YTN; PAM sequence: TTG
atgagtgaaagctcctaaca

SEQ ID NO: 26040 - DNA, 20 bp, Artificial Sequence
  Description of Artificial Sequence: Synthetic oligonucleotide
  Target: PCSK9; (+) strand; PAM type: YTN; PAM sequence: CTC
ctaacacactcagagagcaa

SEQ ID NO: 26041 - DNA, 20 bp, Artificial Sequence
  Description of Artificial Sequence: Synthetic oligonucleotide
  Target: PCSK9; (+) strand; PAM type: YTN; PAM sequence: CTA
acacactcagagagcaagga

SEQ ID NO: 26042 - DNA, 20 bp, Artificial Sequence
  Description of Artificial Sequence: Synthetic oligonucleotide
  Target: PCSK9; (+) strand; PAM type: YTN; PAM sequence: CTC
agagagcaaggactccgcct

SEQ ID NO: 26043 - DNA, 20 bp, Artificial Sequence
  Description of Artificial Sequence: Synthetic oligonucleotide
  Target: PCSK9; (+) strand; PAM type: YTN; PAM sequence: CTC
cgcctcatcccacagcctgg

SEQ ID NO: 26044 - DNA, 20 bp, Artificial Sequence
  Description of Artificial Sequence: Synthetic oligonucleotide
  Target: PCSK9; (+) strand; PAM type: YTN; PAM sequence: CTC
atcccacagcctgggaggag

SEQ ID NO: 26045 - DNA, 20 bp, Artificial Sequence
  Description of Artificial Sequence: Synthetic oligonucleotide
  Target: PCSK9; (+) strand; PAM type: YTN; PAM sequence: CTG
ggaggagaggcagactgcca

SEQ ID NO: 26046 - DNA, 20 bp, Artificial Sequence
  Description of Artificial Sequence: Synthetic oligonucleotide
  Target: PCSK9; (+) strand; PAM type: YTN; PAM sequence: CTG
ccaaggacctgctcagcatg

SEQ ID NO: 26047 - DNA, 20 bp, Artificial Sequence
  Description of Artificial Sequence: Synthetic oligonucleotide
  Target: PCSK9; (+) strand; PAM type: YTN; PAM sequence: CTG
ctcagcatgctacagaagaa

SEQ ID NO: 26048 - DNA, 20 bp, Artificial Sequence
  Description of Artificial Sequence: Synthetic oligonucleotide
  Target: PCSK9; (+) strand; PAM type: YTN; PAM sequence: CTC
agcatgctacagaagaaacc

SEQ ID NO: 26049 - DNA, 20 bp, Artificial Sequence
  Description of Artificial Sequence: Synthetic oligonucleotide
  Target: PCSK9; (+) strand; PAM type: YTN; PAM sequence: CTA
cagaagaaaccaaagtgccc

SEQ ID NO: 26050 - DNA, 20 bp, Artificial Sequence
  Description of Artificial Sequence: Synthetic oligonucleotide
  Target: PCSK9; (+) strand; PAM type: YTN; PAM sequence: CTG
atcagtggagcttcctgccg

SEQ ID NO: 26051 - DNA, 20 bp, Artificial Sequence
  Description of Artificial Sequence: Synthetic oligonucleotide
  Target: PCSK9; (+) strand; PAM type: YTN; PAM sequence: CTT
cctgccgagactggaggcct

SEQ ID NO: 26052 - DNA, 20 bp, Artificial Sequence
  Description of Artificial Sequence: Synthetic oligonucleotide
  Target: PCSK9; (+) strand; PAM type: YTN; PAM sequence: TTC
ctgccgagactggaggcctt

SEQ ID NO: 26053 - DNA, 20 bp, Artificial Sequence
  Description of Artificial Sequence: Synthetic oligonucleotide
  Target: PCSK9; (+) strand; PAM type: YTN; PAM sequence: CTG
ccgagactggaggccttagg

SEQ ID NO: 26054 - DNA, 20 bp, Artificial Sequence
  Description of Artificial Sequence: Synthetic oligonucleotide
  Target: PCSK9; (+) strand; PAM type: YTN; PAM sequence: CTG
gaggccttagggcagggtag

SEQ ID NO: 26055 - DNA, 20 bp, Artificial Sequence
  Description of Artificial Sequence: Synthetic oligonucleotide
  Target: PCSK9; (+) strand; PAM type: YTN; PAM sequence: CTT
agggcagggtagacagtgtg

SEQ ID NO: 26056 - DNA, 20 bp, Artificial Sequence
  Description of Artificial Sequence: Synthetic oligonucleotide
  Target: PCSK9; (+) strand; PAM type: YTN; PAM sequence: TTA
gggcagggtagacagtgtgt

SEQ ID NO: 26057 - DNA, 20 bp, Artificial Sequence
  Description of Artificial Sequence: Synthetic oligonucleotide
  Target: PCSK9; (+) strand; PAM type: YTN; PAM sequence: CTG
gggactcacagttcggactg

SEQ ID NO: 26058 - DNA, 20 bp, Artificial Sequence
  Description of Artificial Sequence: Synthetic oligonucleotide
  Target: PCSK9; (+) strand; PAM type: YTN; PAM sequence: CTC
acagttcggactgtgcccag

SEQ ID NO: 26059 - DNA, 20 bp, Artificial Sequence
  Description of Artificial Sequence: Synthetic oligonucleotide
  Target: PCSK9; (+) strand; PAM type: YTN; PAM sequence: TTC
ggactgtgcccagacctact

SEQ ID NO: 26060 - DNA, 20 bp, Artificial Sequence
  Description of Artificial Sequence: Synthetic oligonucleotide
  Target: PCSK9; (+) strand; PAM type: YTN; PAM sequence: CTG
tgcccagacctactagcata

SEQ ID NO: 26061 - DNA, 20 bp, Artificial Sequence
  Description of Artificial Sequence: Synthetic oligonucleotide
  Target: PCSK9; (+) strand; PAM type: YTN; PAM sequence: CTA
ctagcatagtgggtgggtgg

SEQ ID NO: 26062 - DNA, 20 bp, Artificial Sequence
  Description of Artificial Sequence: Synthetic oligonucleotide
  Target: PCSK9; (+) strand; PAM type: YTN; PAM sequence: CTA
gcatagtgggtgggtgggag

SEQ ID NO: 26063 - DNA, 20 bp, Artificial Sequence
  Description of Artificial Sequence: Synthetic oligonucleotide
  Target: PCSK9; (+) strand; PAM type: YTN; PAM sequence: CTG
ggggccgaccttgcctgaaa

SEQ ID NO: 26064 - DNA, 20 bp, Artificial Sequence
  Description of Artificial Sequence: Synthetic oligonucleotide
  Target: PCSK9; (+) strand; PAM type: YTN; PAM sequence: CTT
gcctgaaattcatgtgggat

SEQ ID NO: 26065 - DNA, 20 bp, Artificial Sequence
  Description of Artificial Sequence: Synthetic oligonucleotide
  Target: PCSK9; (+) strand; PAM type: YTN; PAM sequence: TTG
cctgaaattcatgtgggatc

SEQ ID NO: 26066 - DNA, 20 bp, Artificial Sequence
  Description of Artificial Sequence: Synthetic oligonucleotide
  Target: PCSK9; (+) strand; PAM type: YTN; PAM sequence: CTG
aaattcatgtgggatctcag

SEQ ID NO: 26067 - DNA, 20 bp, Artificial Sequence
  Description of Artificial Sequence: Synthetic oligonucleotide
  Target: PCSK9; (+) strand; PAM type: YTN; PAM sequence: TTC
atgtgggatctcagagcagc

SEQ ID NO: 26068 - DNA, 20 bp, Artificial Sequence
  Description of Artificial Sequence: Synthetic oligonucleotide
  Target: PCSK9; (+) strand; PAM type: YTN; PAM sequence: CTC
agagcagccactgaattgct

SEQ ID NO: 26069 - DNA, 20 bp, Artificial Sequence
  Description of Artificial Sequence: Synthetic oligonucleotide
  Target: PCSK9; (+) strand; PAM type: YTN; PAM sequence: CTG
aattgctctgtagggggcta

SEQ ID NO: 26070 - DNA, 20 bp, Artificial Sequence
  Description of Artificial Sequence: Synthetic oligonucleotide
  Target: PCSK9; (+) strand; PAM type: YTN; PAM sequence: TTG
ctctgtagggggctaaatag

SEQ ID NO: 26071 - DNA, 20 bp, Artificial Sequence
  Description of Artificial Sequence: Synthetic oligonucleotide
  Target: PCSK9; (+) strand; PAM type: YTN; PAM sequence: CTC
tgtagggggctaaatagtgg

SEQ ID NO: 26072 - DNA, 20 bp, Artificial Sequence
  Description of Artificial Sequence: Synthetic oligonucleotide
  Target: PCSK9; (+) strand; PAM type: YTN; PAM sequence: CTG
tagggggctaaatagtggcc

SEQ ID NO: 26073 - DNA, 20 bp, Artificial Sequence
  Description of Artificial Sequence: Synthetic oligonucleotide
  Target: PCSK9; (+) strand; PAM type: YTN; PAM sequence: CTA
aatagtggcccccacagata

SEQ ID NO: 26074 - DNA, 20 bp, Artificial Sequence
  Description of Artificial Sequence: Synthetic oligonucleotide
  Target: PCSK9; (+) strand; PAM type: YTN; PAM sequence: CTG
tgagccagaccttatttgga

SEQ ID NO: 26075 - DNA, 20 bp, Artificial Sequence
  Description of Artificial Sequence: Synthetic oligonucleotide
  Target: PCSK9; (+) strand; PAM type: YTN; PAM sequence: CTT
atttggagaaaaggtctttg

SEQ ID NO: 26076 - DNA, 20 bp, Artificial Sequence
  Description of Artificial Sequence: Synthetic oligonucleotide
  Target: PCSK9; (+) strand; PAM type: YTN; PAM sequence: TTA
tttggagaaaaggtctttgt

SEQ ID NO: 26077 - DNA, 20 bp, Artificial Sequence
  Description of Artificial Sequence: Synthetic oligonucleotide
  Target: PCSK9; (+) strand; PAM type: YTN; PAM sequence: TTT
ggagaaaaggtctttgtaga

SEQ ID NO: 26078 - DNA, 20 bp, Artificial Sequence
  Description of Artificial Sequence: Synthetic oligonucleotide
  Target: PCSK9; (+) strand; PAM type: YTN; PAM sequence: TTG
gagaaaaggtctttgtagat

SEQ ID NO: 26079 - DNA, 20 bp, Artificial Sequence
  Description of Artificial Sequence: Synthetic oligonucleotide
  Target: PCSK9; (+) strand; PAM type: YTN; PAM sequence: CTT
tgtagatgtaattaagcatc

SEQ ID NO: 26080 - DNA, 20 bp, Artificial Sequence
  Description of Artificial Sequence: Synthetic oligonucleotide
  Target: PCSK9; (+) strand; PAM type: YTN; PAM sequence: TTT
gtagatgtaattaagcatct

SEQ ID NO: 26081 - DNA, 20 bp, Artificial Sequence
  Description of Artificial Sequence: Synthetic oligonucleotide
  Target: PCSK9; (+) strand; PAM type: YTN; PAM sequence: TTG
tagatgtaattaagcatctc

SEQ ID NO: 26082 - DNA, 20 bp, Artificial Sequence
  Description of Artificial Sequence: Synthetic oligonucleotide
  Target: PCSK9; (+) strand; PAM type: YTN; PAM sequence: TTA
agcatctcaagatggcatca

SEQ ID NO: 26083 - DNA, 20 bp, Artificial Sequence
  Description of Artificial Sequence: Synthetic oligonucleotide
  Target: PCSK9; (+) strand; PAM type: YTN; PAM sequence: CTC
aagatggcatcatctggatt

SEQ ID NO: 26084 - DNA, 20 bp, Artificial Sequence
  Description of Artificial Sequence: Synthetic oligonucleotide
  Target: PCSK9; (+) strand; PAM type: YTN; PAM sequence: CTG
gattatgcggtgggctgtaa

SEQ ID NO: 26085 - DNA, 20 bp, Artificial Sequence
  Description of Artificial Sequence: Synthetic oligonucleotide
  Target: PCSK9; (+) strand; PAM type: YTN; PAM sequence: TTA
tgcggtgggctgtaagtcct

SEQ ID NO: 26086 - DNA, 20 bp, Artificial Sequence
  Description of Artificial Sequence: Synthetic oligonucleotide
  Target: PCSK9; (+) strand; PAM type: YTN; PAM sequence: CTG
taagtcctgtgatgtgtctt

SEQ ID NO: 26087 - DNA, 20 bp, Artificial Sequence
  Description of Artificial Sequence: Synthetic oligonucleotide
  Target: PCSK9; (+) strand; PAM type: YTN; PAM sequence: CTG
tgatgtgtctttatgagaga

SEQ ID NO: 26088 - DNA, 20 bp, Artificial Sequence
  Description of Artificial Sequence: Synthetic oligonucleotide
  Target: PCSK9; (+) strand; PAM type: YTN; PAM sequence: CTT
tatgagagaaaggcagaggg

SEQ ID NO: 26089 - DNA, 20 bp, Artificial Sequence
  Description of Artificial Sequence: Synthetic oligonucleotide
  Target: PCSK9; (+) strand; PAM type: YTN; PAM sequence: TTT
atgagagaaaggcagaggga

SEQ ID NO: 26090 - DNA, 20 bp, Artificial Sequence
  Description of Artificial Sequence: Synthetic oligonucleotide
  Target: PCSK9; (+) strand; PAM type: YTN; PAM sequence: TTA
tgagagaaaggcagagggag

SEQ ID NO: 26091 - DNA, 20 bp, Artificial Sequence
  Description of Artificial Sequence: Synthetic oligonucleotide
  Target: PCSK9; (+) strand; PAM type: YTN; PAM sequence: TTT
gacacacacaggaggggcca

SEQ ID NO: 26092 - DNA, 20 bp, Artificial Sequence
  Description of Artificial Sequence: Synthetic oligonucleotide
  Target: PCSK9; (+) strand; PAM type: YTN; PAM sequence: TTG
acacacacaggaggggccac

SEQ ID NO: 26093 - DNA, 20 bp, Artificial Sequence
  Description of Artificial Sequence: Synthetic oligonucleotide
  Target: PCSK9; (+) strand; PAM type: YTN; PAM sequence: TTG
gagaaatgtggccacaagcc

SEQ ID NO: 26094 - DNA, 20 bp, Artificial Sequence
  Description of Artificial Sequence: Synthetic oligonucleotide
  Target: PCSK9; (+) strand; PAM type: YTN; PAM sequence: TTC
ttcccagagccttcgctgct

SEQ ID NO: 26095 - DNA, 20 bp, Artificial Sequence
  Description of Artificial Sequence: Synthetic oligonucleotide
  Target: PCSK9; (+) strand; PAM type: YTN; PAM sequence: CTT
cccagagccttcgctgctga

SEQ ID NO: 26096 - DNA, 20 bp, Artificial Sequence
  Description of Artificial Sequence: Synthetic oligonucleotide
  Target: PCSK9; (+) strand; PAM type: YTN; PAM sequence: TTC
ccagagccttcgctgctgag

SEQ ID NO: 26097 - DNA, 20 bp, Artificial Sequence
  Description of Artificial Sequence: Synthetic oligonucleotide
  Target: PCSK9; (+) strand; PAM type: YTN; PAM sequence: CTT
cgctgctgagtctgggaatt

SEQ ID NO: 26098 - DNA, 20 bp, Artificial Sequence
  Description of Artificial Sequence: Synthetic oligonucleotide
  Target: PCSK9; (+) strand; PAM type: YTN; PAM sequence: TTC
gctgctgagtctgggaattt

SEQ ID NO: 26099 - DNA, 20 bp, Artificial Sequence
  Description of Artificial Sequence: Synthetic oligonucleotide
  Target: PCSK9; (+) strand; PAM type: YTN; PAM sequence: CTG
ctgagtctgggaatttgtga

SEQ ID NO: 26100 - DNA, 20 bp, Artificial Sequence
  Description of Artificial Sequence: Synthetic oligonucleotide
  Target: PCSK9; (+) strand; PAM type: YTN; PAM sequence: CTG
agtctgggaatttgtgaccg

SEQ ID NO: 26101 - DNA, 20 bp, Artificial Sequence
  Description of Artificial Sequence: Synthetic oligonucleotide
  Target: PCSK9; (+) strand; PAM type: YTN; PAM sequence: CTG
ggaatttgtgaccgaagcca

SEQ ID NO: 26102 - DNA, 20 bp, Artificial Sequence
  Description of Artificial Sequence: Synthetic oligonucleotide
  Target: PCSK9; (+) strand; PAM type: YTN; PAM sequence: TTT
gtgaccgaagccataagaag

SEQ ID NO: 26103 - DNA, 20 bp, Artificial Sequence
  Description of Artificial Sequence: Synthetic oligonucleotide
  Target: PCSK9; (+) strand; PAM type: YTN; PAM sequence: TTG
tgaccgaagccataagaagt

SEQ ID NO: 26104 - DNA, 20 bp, Artificial Sequence
  Description of Artificial Sequence: Synthetic oligonucleotide
  Target: PCSK9; (+) strand; PAM type: YTN; PAM sequence: CTG
agcctcccacacttgctcac

SEQ ID NO: 26105 - DNA, 20 bp, Artificial Sequence
  Description of Artificial Sequence: Synthetic oligonucleotide
  Target: PCSK9; (+) strand; PAM type: YTN; PAM sequence: CTC
ccacacttgctcacctgtcc

SEQ ID NO: 26106 - DNA, 20 bp, Artificial Sequence
  Description of Artificial Sequence: Synthetic oligonucleotide
  Target: PCSK9; (+) strand; PAM type: YTN; PAM sequence: CTT
gctcacctgtcctgagatga

SEQ ID NO: 26107 - DNA, 20 bp, Artificial Sequence
  Description of Artificial Sequence: Synthetic oligonucleotide
  Target: PCSK9; (+) strand; PAM type: YTN; PAM sequence: TTG
ctcacctgtcctgagatgag

SEQ ID NO: 26108 - DNA, 20 bp, Artificial Sequence
  Description of Artificial Sequence: Synthetic oligonucleotide
  Target: PCSK9; (+) strand; PAM type: YTN; PAM sequence: CTC
acctgtcctgagatgagaat

SEQ ID NO: 26109 - DNA, 20 bp, Artificial Sequence
  Description of Artificial Sequence: Synthetic oligonucleotide
  Target: PCSK9; (+) strand; PAM type: YTN; PAM sequence: CTG
tcctgagatgagaatctcta

SEQ ID NO: 26110 - DNA, 20 bp, Artificial Sequence
  Description of Artificial Sequence: Synthetic oligonucleotide
  Target: PCSK9; (+) strand; PAM type: YTN; PAM sequence: CTG
agatgagaatctctactctg

SEQ ID NO: 26111 - DNA, 20 bp, Artificial Sequence
  Description of Artificial Sequence: Synthetic oligonucleotide
  Target: PCSK9; (+) strand; PAM type: YTN; PAM sequence: CTC
tactctgcagcatatttgga

SEQ ID NO: 26112 - DNA, 20 bp, Artificial Sequence
  Description of Artificial Sequence: Synthetic oligonucleotide
  Target: PCSK9; (+) strand; PAM type: YTN; PAM sequence: CTA
ctctgcagcatatttggagg

SEQ ID NO: 26113 - DNA, 20 bp, Artificial Sequence
  Description of Artificial Sequence: Synthetic oligonucleotide
  Target: PCSK9; (+) strand; PAM type: YTN; PAM sequence: CTC
tgcagcatatttggaggatc

SEQ ID NO: 26114 - DNA, 20 bp, Artificial Sequence
  Description of Artificial Sequence: Synthetic oligonucleotide
  Target: PCSK9; (+) strand; PAM type: YTN; PAM sequence: CTG
cagcatatttggaggatcac

SEQ ID NO: 26115 - DNA, 20 bp, Artificial Sequence
  Description of Artificial Sequence: Synthetic oligonucleotide
  Target: PCSK9; (+) strand; PAM type: YTN; PAM sequence: TTT
ggaggatcactgcgggggcc

SEQ ID NO: 26116 - DNA, 20 bp, Artificial Sequence
  Description of Artificial Sequence: Synthetic oligonucleotide
  Target: PCSK9; (+) strand; PAM type: YTN; PAM sequence: TTG
gaggatcactgcgggggcca

SEQ ID NO: 26117 - DNA, 20 bp, Artificial Sequence
  Description of Artificial Sequence: Synthetic oligonucleotide
  Target: PCSK9; (+) strand; PAM type: YTN; PAM sequence: CTG
cgggggccacagaggtgctg

SEQ ID NO: 26118 - DNA, 20 bp, Artificial Sequence
  Description of Artificial Sequence: Synthetic oligonucleotide
  Target: PCSK9; (+) strand; PAM type: YTN; PAM sequence: CTG
ttcagatggcacttcagaag

SEQ ID NO: 26119 - DNA, 20 bp, Artificial Sequence
  Description of Artificial Sequence: Synthetic oligonucleotide
  Target: PCSK9; (+) strand; PAM type: YTN; PAM sequence: TTC
agatggcacttcagaagact

SEQ ID NO: 26120 - DNA, 20 bp, Artificial Sequence
  Description of Artificial Sequence: Synthetic oligonucleotide
  Target: PCSK9; (+) strand; PAM type: YTN; PAM sequence: CTT
cagaagactcaggagaccct

SEQ ID NO: 26121 - DNA, 20 bp, Artificial Sequence
  Description of Artificial Sequence: Synthetic oligonucleotide
  Target: PCSK9; (+) strand; PAM type: YTN; PAM sequence: TTC
agaagactcaggagaccctg

SEQ ID NO: 26122 - DNA, 20 bp, Artificial Sequence
  Description of Artificial Sequence: Synthetic oligonucleotide
  Target: PCSK9; (+) strand; PAM type: YTN; PAM sequence: CTC
aggagaccctggggcaggag

SEQ ID NO: 26123 - DNA, 20 bp, Artificial Sequence
  Description of Artificial Sequence: Synthetic oligonucleotide
  Target: PCSK9; (+) strand; PAM type: YTN; PAM sequence: CTG
gggcaggagcagtttgactg

SEQ ID NO: 26124 - DNA, 20 bp, Artificial Sequence
  Description of Artificial Sequence: Synthetic oligonucleotide
  Target: PCSK9; (+) strand; PAM type: YTN; PAM sequence: TTT
gactgacagcccagagggct

SEQ ID NO: 26125 - DNA, 20 bp, Artificial Sequence
  Description of Artificial Sequence: Synthetic oligonucleotide
  Target: PCSK9; (+) strand; PAM type: YTN; PAM sequence: TTG
actgacagcccagagggctg

SEQ ID NO: 26126 - DNA, 20 bp, Artificial Sequence
  Description of Artificial Sequence: Synthetic oligonucleotide
  Target: PCSK9; (+) strand; PAM type: YTN; PAM sequence: CTG
acagcccagagggctgccct

SEQ ID NO: 26127 - DNA, 20 bp, Artificial Sequence
  Description of Artificial Sequence: Synthetic oligonucleotide
  Target: PCSK9; (+) strand; PAM type: YTN; PAM sequence: CTG
ccctctgattccacctgagg

SEQ ID NO: 26128 - DNA, 20 bp, Artificial Sequence
  Description of Artificial Sequence: Synthetic oligonucleotide
  Target: PCSK9; (+) strand; PAM type: YTN; PAM sequence: CTC
tgattccacctgaggccctg

SEQ ID NO: 26129 - DNA, 20 bp, Artificial Sequence
  Description of Artificial Sequence: Synthetic oligonucleotide
  Target: PCSK9; (+) strand; PAM type: YTN; PAM sequence: CTG
attccacctgaggccctgct

SEQ ID NO: 26130 - DNA, 20 bp, Artificial Sequence
  Description of Artificial Sequence: Synthetic oligonucleotide
  Target: PCSK9; (+) strand; PAM type: YTN; PAM sequence: TTC
cacctgaggccctgcttttc

SEQ ID NO: 26131 - DNA, 20 bp, Artificial Sequence
  Description of Artificial Sequence: Synthetic oligonucleotide
  Target: PCSK9; (+) strand; PAM type: YTN; PAM sequence: CTG
aggccctgcttttcctggct

SEQ ID NO: 26132 - DNA, 20 bp, Artificial Sequence
  Description of Artificial Sequence: Synthetic oligonucleotide
  Target: PCSK9; (+) strand; PAM type: YTN; PAM sequence: CTG
cttttcctggctgcaggggt

SEQ ID NO: 26133 - DNA, 20 bp, Artificial Sequence
  Description of Artificial Sequence: Synthetic oligonucleotide
  Target: PCSK9; (+) strand; PAM type: YTN; PAM sequence: CTT
ttcctggctgcaggggttcc

SEQ ID NO: 26134 - DNA, 20 bp, Artificial Sequence
  Description of Artificial Sequence: Synthetic oligonucleotide
  Target: PCSK9; (+) strand; PAM type: YTN; PAM sequence: TTT
tcctggctgcaggggttcca

SEQ ID NO: 26135 - DNA, 20 bp, Artificial Sequence
  Description of Artificial Sequence: Synthetic oligonucleotide
  Target: PCSK9; (+) strand; PAM type: YTN; PAM sequence: TTT
cctggctgcaggggttccag

SEQ ID NO: 26136 - DNA, 20 bp, Artificial Sequence
  Description of Artificial Sequence: Synthetic oligonucleotide
  Target: PCSK9; (+) strand; PAM type: YTN; PAM sequence: TTC
ctggctgcaggggttccagg

SEQ ID NO: 26137 - DNA, 20 bp, Artificial Sequence
  Description of Artificial Sequence: Synthetic oligonucleotide
  Target: PCSK9; (+) strand; PAM type: YTN; PAM sequence: CTG
gctgcaggggttccagggcc

SEQ ID NO: 26138 - DNA, 20 bp, Artificial Sequence
  Description of Artificial Sequence: Synthetic oligonucleotide
  Target: PCSK9; (+) strand; PAM type: YTN; PAM sequence: CTG
caggggttccagggccaggc

SEQ ID NO: 26139 - DNA, 20 bp, Artificial Sequence
  Description of Artificial Sequence: Synthetic oligonucleotide
  Target: PCSK9; (+) strand; PAM type: YTN; PAM sequence: TTC
cagggccaggccatttccgc

SEQ ID NO: 26140 - DNA, 20 bp, Artificial Sequence
  Description of Artificial Sequence: Synthetic oligonucleotide
  Target: PCSK9; (+) strand; PAM type: YTN; PAM sequence: TTT
ccgctggcgcaggactctgc

SEQ ID NO: 26141 - DNA, 20 bp, Artificial Sequence
  Description of Artificial Sequence: Synthetic oligonucleotide
  Target: PCSK9; (+) strand; PAM type: YTN; PAM sequence: TTC
cgctggcgcaggactctgct

SEQ ID NO: 26142 - DNA, 20 bp, Artificial Sequence
  Description of Artificial Sequence: Synthetic oligonucleotide
  Target: PCSK9; (+) strand; PAM type: YTN; PAM sequence: CTG
gcgcaggactctgctagcag

SEQ ID NO: 26143 - DNA, 20 bp, Artificial Sequence
  Description of Artificial Sequence: Synthetic oligonucleotide
  Target: PCSK9; (+) strand; PAM type: YTN; PAM sequence: CTC
tgctagcagcaacctgcctg

SEQ ID NO: 26144 - DNA, 20 bp, Artificial Sequence
  Description of Artificial Sequence: Synthetic oligonucleotide
  Target: PCSK9; (+) strand; PAM type: YTN; PAM sequence: CTG
ctagcagcaacctgcctgaa

SEQ ID NO: 26145 - DNA, 20 bp, Artificial Sequence
  Description of Artificial Sequence: Synthetic oligonucleotide
  Target: PCSK9; (+) strand; PAM type: YTN; PAM sequence: CTA
gcagcaacctgcctgaagtc

SEQ ID NO: 26146 - DNA, 20 bp, Artificial Sequence
  Description of Artificial Sequence: Synthetic oligonucleotide
  Target: PCSK9; (+) strand; PAM type: YTN; PAM sequence: CTG
cctgaagtcttcctttggcc

SEQ ID NO: 26147 - DNA, 20 bp, Artificial Sequence
  Description of Artificial Sequence: Synthetic oligonucleotide
  Target: PCSK9; (+) strand; PAM type: YTN; PAM sequence: CTG
aagtcttcctttggcctggc

SEQ ID NO: 26148 - DNA, 20 bp, Artificial Sequence
  Description of Artificial Sequence: Synthetic oligonucleotide
  Target: PCSK9; (+) strand; PAM type: YTN; PAM sequence: CTT
cctttggcctggctgagagt

SEQ ID NO: 26149 - DNA, 20 bp, Artificial Sequence
  Description of Artificial Sequence: Synthetic oligonucleotide
  Target: PCSK9; (+) strand; PAM type: YTN; PAM sequence: TTC
ctttggcctggctgagagtt

SEQ ID NO: 26150 - DNA, 20 bp, Artificial Sequence
  Description of Artificial Sequence: Synthetic oligonucleotide
  Target: PCSK9; (+) strand; PAM type: YTN; PAM sequence: CTT
tggcctggctgagagtttct

SEQ ID NO: 26151 - DNA, 20 bp, Artificial Sequence
  Description of Artificial Sequence: Synthetic oligonucleotide
  Target: PCSK9; (+) strand; PAM type: YTN; PAM sequence: TTT
ggcctggctgagagtttctg

SEQ ID NO: 26152 - DNA, 20 bp, Artificial Sequence
  Description of Artificial Sequence: Synthetic oligonucleotide
  Target: PCSK9; (+) strand; PAM type: YTN; PAM sequence: TTG
gcctggctgagagtttctga

SEQ ID NO: 26153 - DNA, 20 bp, Artificial Sequence
  Description of Artificial Sequence: Synthetic oligonucleotide
  Target: PCSK9; (+) strand; PAM type: YTN; PAM sequence: CTG
gctgagagtttctgagacct

SEQ ID NO: 26154 - DNA, 20 bp, Artificial Sequence
  Description of Artificial Sequence: Synthetic oligonucleotide
  Target: PCSK9; (+) strand; PAM type: YTN; PAM sequence: CTG
agagtttctgagacctgcgc

SEQ ID NO: 26155 - DNA, 20 bp, Artificial Sequence
  Description of Artificial Sequence: Synthetic oligonucleotide
  Target: PCSK9; (+) strand; PAM type: YTN; PAM sequence: TTT
ctgagacctgcgctggagcg

SEQ ID NO: 26156 - DNA, 20 bp, Artificial Sequence
  Description of Artificial Sequence: Synthetic oligonucleotide
  Target: PCSK9; (+) strand; PAM type: YTN; PAM sequence: TTC
tgagacctgcgctggagcgg

SEQ ID NO: 26157 - DNA, 20 bp, Artificial Sequence
  Description of Artificial Sequence: Synthetic oligonucleotide
  Target: PCSK9; (+) strand; PAM type: YTN; PAM sequence: CTG
agacctgcgctggagcggag

SEQ ID NO: 26158 - DNA, 20 bp, Artificial Sequence
  Description of Artificial Sequence: Synthetic oligonucleotide
  Target: PCSK9; (+) strand; PAM type: YTN; PAM sequence: CTG
cgctggagcggaggtgcttc

SEQ ID NO: 26159 - DNA, 20 bp, Artificial Sequence
  Description of Artificial Sequence: Synthetic oligonucleotide
  Target: PCSK9; (+) strand; PAM type: YTN; PAM sequence: CTG
gagcggaggtgcttccttcc

SEQ ID NO: 26160 - DNA, 20 bp, Artificial Sequence
  Description of Artificial Sequence: Synthetic oligonucleotide
  Target: PCSK9; (+) strand; PAM type: YTN; PAM sequence: CTT
ccttccttgcttcctttctt

SEQ ID NO: 26161 - DNA, 20 bp, Artificial Sequence
  Description of Artificial Sequence: Synthetic oligonucleotide
  Target: PCSK9; (+) strand; PAM type: YTN; PAM sequence: TTC
cttccttgcttcctttcttc

SEQ ID NO: 26162 - DNA, 20 bp, Artificial Sequence
  Description of Artificial Sequence: Synthetic oligonucleotide
  Target: PCSK9; (+) strand; PAM type: YTN; PAM sequence: CTT
ccttgcttcctttcttcctc

SEQ ID NO: 26163 - DNA, 20 bp, Artificial Sequence
  Description of Artificial Sequence: Synthetic oligonucleotide
  Target: PCSK9; (+) strand; PAM type: YTN; PAM sequence: TTC
cttgcttcctttcttcctct

SEQ ID NO: 26164 - DNA, 20 bp, Artificial Sequence
  Description of Artificial Sequence: Synthetic oligonucleotide
  Target: PCSK9; (+) strand; PAM type: YTN; PAM sequence: CTT
gcttcctttcttcctctctc

SEQ ID NO: 26165 - DNA, 20 bp, Artificial Sequence
  Description of Artificial Sequence: Synthetic oligonucleotide
  Target: PCSK9; (+) strand; PAM type: YTN; PAM sequence: TTG
cttcctttcttcctctctcc

SEQ ID NO: 26166 - DNA, 20 bp, Artificial Sequence
  Description of Artificial Sequence: Synthetic oligonucleotide
  Target: PCSK9; (+) strand; PAM type: YTN; PAM sequence: CTT
cctttcttcctctctccctt

SEQ ID NO: 26167 - DNA, 20 bp, Artificial Sequence
  Description of Artificial Sequence: Synthetic oligonucleotide
  Target: PCSK9; (+) strand; PAM type: YTN; PAM sequence: TTC
ctttcttcctctctcccttc

SEQ ID NO: 26168 - DNA, 20 bp, Artificial Sequence
  Description of Artificial Sequence: Synthetic oligonucleotide
  Target: PCSK9; (+) strand; PAM type: YTN; PAM sequence: CTT
tcttcctctctcccttctcc

SEQ ID NO: 26169 - DNA, 20 bp, Artificial Sequence
  Description of Artificial Sequence: Synthetic oligonucleotide
  Target: PCSK9; (+) strand; PAM type: YTN; PAM sequence: TTT
cttcctctctcccttctcca

SEQ ID NO: 26170 - DNA, 20 bp, Artificial Sequence
  Description of Artificial Sequence: Synthetic oligonucleotide
  Target: PCSK9; (+) strand; PAM type: YTN; PAM sequence: TTC
ttcctctctcccttctccat

SEQ ID NO: 26171 - DNA, 20 bp, Artificial Sequence
  Description of Artificial Sequence: Synthetic oligonucleotide
  Target: PCSK9; (+) strand; PAM type: YTN; PAM sequence: CTT
cctctctcccttctccatcc

SEQ ID NO: 26172 - DNA, 20 bp, Artificial Sequence
  Description of Artificial Sequence: Synthetic oligonucleotide
  Target: PCSK9; (+) strand; PAM type: YTN; PAM sequence: TTC
ctctctcccttctccatcca

SEQ ID NO: 26173 - DNA, 20 bp, Artificial Sequence
  Description of Artificial Sequence: Synthetic oligonucleotide
  Target: PCSK9; (+) strand; PAM type: YTN; PAM sequence: CTC
tctcccttctccatccagca

SEQ ID NO: 26174 - DNA, 20 bp, Artificial Sequence
  Description of Artificial Sequence: Synthetic oligonucleotide
  Target: PCSK9; (+) strand; PAM type: YTN; PAM sequence: CTC
tcccttctccatccagcagg

SEQ ID NO: 26175 - DNA, 20 bp, Artificial Sequence
  Description of Artificial Sequence: Synthetic oligonucleotide
  Target: PCSK9; (+) strand; PAM type: YTN; PAM sequence: CTC
ccttctccatccagcaggct

SEQ ID NO: 26176 - DNA, 20 bp, Artificial Sequence
  Description of Artificial Sequence: Synthetic oligonucleotide
  Target: PCSK9; (+) strand; PAM type: YTN; PAM sequence: CTT
ctccatccagcaggctggac

SEQ ID NO: 26177 - DNA, 20 bp, Artificial Sequence
  Description of Artificial Sequence: Synthetic oligonucleotide
  Target: PCSK9; (+) strand; PAM type: YTN; PAM sequence: TTC
tccatccagcaggctggacc

SEQ ID NO: 26178 - DNA, 20 bp, Artificial Sequence
  Description of Artificial Sequence: Synthetic oligonucleotide
  Target: PCSK9; (+) strand; PAM type: YTN; PAM sequence: CTC
catccagcaggctggacctg

SEQ ID NO: 26179 - DNA, 20 bp, Artificial Sequence
  Description of Artificial Sequence: Synthetic oligonucleotide
  Target: PCSK9; (+) strand; PAM type: YTN; PAM sequence: CTG
gacctgcctggcatctgtga

SEQ ID NO: 26180 - DNA, 20 bp, Artificial Sequence
  Description of Artificial Sequence: Synthetic oligonucleotide
  Target: PCSK9; (+) strand; PAM type: YTN; PAM sequence: CTG
cctggcatctgtgagctctc

SEQ ID NO: 26181 - DNA, 20 bp, Artificial Sequence
  Description of Artificial Sequence: Synthetic oligonucleotide
  Target: PCSK9; (+) strand; PAM type: YTN; PAM sequence: CTG
gcatctgtgagctctcccta

SEQ ID NO: 26182 - DNA, 20 bp, Artificial Sequence
  Description of Artificial Sequence: Synthetic oligonucleotide
  Target: PCSK9; (+) strand; PAM type: YTN; PAM sequence: CTG
tgagctctccctactttctc

SEQ ID NO: 26183 - DNA, 20 bp, Artificial Sequence
  Description of Artificial Sequence: Synthetic oligonucleotide
  Target: PCSK9; (+) strand; PAM type: YTN; PAM sequence: CTC
tccctactttctcctatacc

SEQ ID NO: 26184 - DNA, 20 bp, Artificial Sequence
  Description of Artificial Sequence: Synthetic oligonucleotide
  Target: PCSK9; (+) strand; PAM type: YTN; PAM sequence: CTC
cctactttctcctataccct

SEQ ID NO: 26185 - DNA, 20 bp, Artificial Sequence
  Description of Artificial Sequence: Synthetic oligonucleotide
  Target: PCSK9; (+) strand; PAM type: YTN; PAM sequence: CTA
ctttctcctataccctaacc

SEQ ID NO: 26186 - DNA, 20 bp, Artificial Sequence
  Description of Artificial Sequence: Synthetic oligonucleotide
  Target: PCSK9; (+) strand; PAM type: YTN; PAM sequence: CTT
tctcctataccctaaccttt

SEQ ID NO: 26187 - DNA, 20 bp, Artificial Sequence
  Description of Artificial Sequence: Synthetic oligonucleotide
  Target: PCSK9; (+) strand; PAM type: YTN; PAM sequence: TTT
ctcctataccctaacctttg

SEQ ID NO: 26188 - DNA, 20 bp, Artificial Sequence
  Description of Artificial Sequence: Synthetic oligonucleotide
  Target: PCSK9; (+) strand; PAM type: YTN; PAM sequence: TTC
tcctataccctaacctttgt

SEQ ID NO: 26189 - DNA, 20 bp, Artificial Sequence
  Description of Artificial Sequence: Synthetic oligonucleotide
  Target: PCSK9; (+) strand; PAM type: YTN; PAM sequence: CTC
ctataccctaacctttgtcc

SEQ ID NO: 26190 - DNA, 20 bp, Artificial Sequence
  Description of Artificial Sequence: Synthetic oligonucleotide
  Target: PCSK9; (+) strand; PAM type: YTN; PAM sequence: CTA
taccctaacctttgtcctgc

SEQ ID NO: 26191 - DNA, 20 bp, Artificial Sequence
  Description of Artificial Sequence: Synthetic oligonucleotide
  Target: PCSK9; (+) strand; PAM type: YTN; PAM sequence: CTA
acctttgtcctgcatgggcg

SEQ ID NO: 26192 - DNA, 20 bp, Artificial Sequence
  Description of Artificial Sequence: Synthetic oligonucleotide
  Target: PCSK9; (+) strand; PAM type: YTN; PAM sequence: CTT
tgtcctgcatgggcgactcc

SEQ ID NO: 26193 - DNA, 20 bp, Artificial Sequence
  Description of Artificial Sequence: Synthetic oligonucleotide
  Target: PCSK9; (+) strand; PAM type: YTN; PAM sequence: TTT
gtcctgcatgggcgactccc

SEQ ID NO: 26194 - DNA, 20 bp, Artificial Sequence
  Description of Artificial Sequence: Synthetic oligonucleotide
  Target: PCSK9; (+) strand; PAM type: YTN; PAM sequence: TTG
tcctgcatgggcgactcccc

SEQ ID NO: 26195 - DNA, 20 bp, Artificial Sequence
  Description of Artificial Sequence: Synthetic oligonucleotide
  Target: PCSK9; (+) strand; PAM type: YTN; PAM sequence: CTG
catgggcgactcccccagtg

SEQ ID NO: 26196 - DNA, 20 bp, Artificial Sequence
  Description of Artificial Sequence: Synthetic oligonucleotide
  Target: PCSK9; (+) strand; PAM type: YTN; PAM sequence: CTC
ccccagtgagtctcttgcag

SEQ ID NO: 26197 - DNA, 20 bp, Artificial Sequence
  Description of Artificial Sequence: Synthetic oligonucleotide
  Target: PCSK9; (+) strand; PAM type: YTN; PAM sequence: CTC
ttgcagcttttaccccagtg

SEQ ID NO: 26198 - DNA, 20 bp, Artificial Sequence
  Description of Artificial Sequence: Synthetic oligonucleotide
  Target: PCSK9; (+) strand; PAM type: YTN; PAM sequence: CTT
gcagcttttaccccagtgcc

SEQ ID NO: 26199 - DNA, 20 bp, Artificial Sequence
  Description of Artificial Sequence: Synthetic oligonucleotide
  Target: PCSK9; (+) strand; PAM type: YTN; PAM sequence: TTG
cagcttttaccccagtgcct

SEQ ID NO: 26200 - DNA, 20 bp, Artificial Sequence
  Description of Artificial Sequence: Synthetic oligonucleotide
  Target: PCSK9; (+) strand; PAM type: YTN; PAM sequence: CTT
ttaccccagtgcctgcttct

SEQ ID NO: 26201 - DNA, 20 bp, Artificial Sequence
  Description of Artificial Sequence: Synthetic oligonucleotide
  Target: PCSK9; (+) strand; PAM type: YTN; PAM sequence: TTT
taccccagtgcctgcttctt

SEQ ID NO: 26202 - DNA, 20 bp, Artificial Sequence
  Description of Artificial Sequence: Synthetic oligonucleotide
  Target: PCSK9; (+) strand; PAM type: YTN; PAM sequence: TTT
accccagtgcctgcttcttg

SEQ ID NO: 26203 - DNA, 20 bp, Artificial Sequence
  Description of Artificial Sequence: Synthetic oligonucleotide
  Target: PCSK9; (+) strand; PAM type: YTN; PAM sequence: TTA
ccccagtgcctgcttcttgg

SEQ ID NO: 26204 - DNA, 20 bp, Artificial Sequence
  Description of Artificial Sequence: Synthetic oligonucleotide
  Target: PCSK9; (+) strand; PAM type: YTN; PAM sequence: CTG
cttcttggagaatccaaact

SEQ ID NO: 26205 - DNA, 20 bp, Artificial Sequence
  Description of Artificial Sequence: Synthetic oligonucleotide
  Target: PCSK9; (+) strand; PAM type: YTN; PAM sequence: CTT
cttggagaatccaaactgat

SEQ ID NO: 26206 - DNA, 20 bp, Artificial Sequence
  Description of Artificial Sequence: Synthetic oligonucleotide
  Target: PCSK9; (+) strand; PAM type: YTN; PAM sequence: TTC
ttggagaatccaaactgatc

SEQ ID NO: 26207 - DNA, 20 bp, Artificial Sequence
  Description of Artificial Sequence: Synthetic oligonucleotide
  Target: PCSK9; (+) strand; PAM type: YTN; PAM sequence: CTT
ggagaatccaaactgatcca

SEQ ID NO: 26208 - DNA, 20 bp, Artificial Sequence
  Description of Artificial Sequence: Synthetic oligonucleotide
  Target: PCSK9; (+) strand; PAM type: YTN; PAM sequence: TTG
gagaatccaaactgatccag

SEQ ID NO: 26209 - DNA, 20 bp, Artificial Sequence
  Description of Artificial Sequence: Synthetic oligonucleotide
  Target: PCSK9; (+) strand; PAM type: YTN; PAM sequence: CTG
atccagttagggatgataaa

SEQ ID NO: 26210 - DNA, 20 bp, Artificial Sequence
  Description of Artificial Sequence: Synthetic oligonucleotide
  Target: PCSK9; (+) strand; PAM type: YTN; PAM sequence: TTA
gggatgataaagtgtagggt

SEQ ID NO: 26211 - DNA, 20 bp, Artificial Sequence
  Description of Artificial Sequence: Synthetic oligonucleotide
  Target: PCSK9; (+) strand; PAM type: YTN; PAM sequence: CTC
ggtgactgttttctctgagg

SEQ ID NO: 26212 - DNA, 20 bp, Artificial Sequence
  Description of Artificial Sequence: Synthetic oligonucleotide
  Target: PCSK9; (+) strand; PAM type: YTN; PAM sequence: CTG
ttttctctgaggttgtgact

SEQ ID NO: 26213 - DNA, 20 bp, Artificial Sequence
  Description of Artificial Sequence: Synthetic oligonucleotide
  Target: PCSK9; (+) strand; PAM type: YTN; PAM sequence: TTT
tctctgaggttgtgactcgt

SEQ ID NO: 26214 - DNA, 20 bp, Artificial Sequence
  Description of Artificial Sequence: Synthetic oligonucleotide
  Target: PCSK9; (+) strand; PAM type: YTN; PAM sequence: TTT
ctctgaggttgtgactcgtg

SEQ ID NO: 26215 - DNA, 20 bp, Artificial Sequence
  Description of Artificial Sequence: Synthetic oligonucleotide
  Target: PCSK9; (+) strand; PAM type: YTN; PAM sequence: TTC
tctgaggttgtgactcgtgt

SEQ ID NO: 26216 - DNA, 20 bp, Artificial Sequence
  Description of Artificial Sequence: Synthetic oligonucleotide
  Target: PCSK9; (+) strand; PAM type: YTN; PAM sequence: CTC
tgaggttgtgactcgtgtga

SEQ ID NO: 26217 - DNA, 20 bp, Artificial Sequence
  Description of Artificial Sequence: Synthetic oligonucleotide
  Target: PCSK9; (+) strand; PAM type: YTN; PAM sequence: CTG
aggttgtgactcgtgtgagg

SEQ ID NO: 26218 - DNA, 20 bp, Artificial Sequence
  Description of Artificial Sequence: Synthetic oligonucleotide
  Target: PCSK9; (+) strand; PAM type: YTN; PAM sequence: TTG
tgactcgtgtgaggcagaag

SEQ ID NO: 26219 - DNA, 20 bp, Artificial Sequence
  Description of Artificial Sequence: Synthetic oligonucleotide
  Target: PCSK9; (+) strand; PAM type: YTN; PAM sequence: CTC
gtgtgaggcagaagcagtcc

SEQ ID NO: 26220 - DNA, 20 bp, Artificial Sequence
  Description of Artificial Sequence: Synthetic oligonucleotide
  Target: PCSK9; (+) strand; PAM type: YTN; PAM sequence: CTC
ctggtatcttgtggagtgga

SEQ ID NO: 26221 - DNA, 20 bp, Artificial Sequence
  Description of Artificial Sequence: Synthetic oligonucleotide
  Target: PCSK9; (+) strand; PAM type: YTN; PAM sequence: CTG
gtatcttgtggagtggagaa

SEQ ID NO: 26222 - DNA, 20 bp, Artificial Sequence
  Description of Artificial Sequence: Synthetic oligonucleotide
  Target: PCSK9; (+) strand; PAM type: YTN; PAM sequence: CTT
gtggagtggagaacgcttgg

SEQ ID NO: 26223 - DNA, 20 bp, Artificial Sequence
  Description of Artificial Sequence: Synthetic oligonucleotide
  Target: PCSK9; (+) strand; PAM type: YTN; PAM sequence: TTG
tggagtggagaacgcttgga

SEQ ID NO: 26224 - DNA, 20 bp, Artificial Sequence
  Description of Artificial Sequence: Synthetic oligonucleotide
  Target: PCSK9; (+) strand; PAM type: YTN; PAM sequence: CTT
ggacctggagccaggaggcc

SEQ ID NO: 26225 - DNA, 20 bp, Artificial Sequence
  Description of Artificial Sequence: Synthetic oligonucleotide
  Target: PCSK9; (+) strand; PAM type: YTN; PAM sequence: TTG
gacctggagccaggaggccc

SEQ ID NO: 26226 - DNA, 20 bp, Artificial Sequence
  Description of Artificial Sequence: Synthetic oligonucleotide
  Target: PCSK9; (+) strand; PAM type: YTN; PAM sequence: CTG
gagccaggaggcccagacat

SEQ ID NO: 26227 - DNA, 20 bp, Artificial Sequence
  Description of Artificial Sequence: Synthetic oligonucleotide
  Target: PCSK9; (+) strand; PAM type: YTN; PAM sequence: CTG
tccgagctgcagcttcctgt

SEQ ID NO: 26228 - DNA, 20 bp, Artificial Sequence
  Description of Artificial Sequence: Synthetic oligonucleotide
  Target: PCSK9; (+) strand; PAM type: YTN; PAM sequence: CTG
cagcttcctgtctctaaaat

SEQ ID NO: 26229 - DNA, 20 bp, Artificial Sequence
  Description of Artificial Sequence: Synthetic oligonucleotide
  Target: PCSK9; (+) strand; PAM type: YTN; PAM sequence: CTT
cctgtctctaaaatgagccg

SEQ ID NO: 26230 - DNA, 20 bp, Artificial Sequence
  Description of Artificial Sequence: Synthetic oligonucleotide
  Target: PCSK9; (+) strand; PAM type: YTN; PAM sequence: TTC
ctgtctctaaaatgagccgg

SEQ ID NO: 26231 - DNA, 20 bp, Artificial Sequence
  Description of Artificial Sequence: Synthetic oligonucleotide
  Target: PCSK9; (+) strand; PAM type: YTN; PAM sequence: CTG
tctctaaaatgagccggcca

SEQ ID NO: 26232 - DNA, 20 bp, Artificial Sequence
  Description of Artificial Sequence: Synthetic oligonucleotide
  Target: PCSK9; (+) strand; PAM type: YTN; PAM sequence: CTC
taaaatgagccggccagcgc

SEQ ID NO: 26233 - DNA, 20 bp, Artificial Sequence
  Description of Artificial Sequence: Synthetic oligonucleotide
  Target: PCSK9; (+) strand; PAM type: YTN; PAM sequence: CTA
aaatgagccggccagcgcag

SEQ ID NO: 26234 - DNA, 20 bp, Artificial Sequence
  Description of Artificial Sequence: Synthetic oligonucleotide
  Target: PCSK9; (+) strand; PAM type: YTN; PAM sequence: CTG
ttattctcctttgagtcttt

SEQ ID NO: 26235 - DNA, 20 bp, Artificial Sequence
  Description of Artificial Sequence: Synthetic oligonucleotide
  Target: PCSK9; (+) strand; PAM type: YTN; PAM sequence: TTA
ttctcctttgagtctttaaa

SEQ ID NO: 26236 - DNA, 20 bp, Artificial Sequence
  Description of Artificial Sequence: Synthetic oligonucleotide
  Target: PCSK9; (+) strand; PAM type: YTN; PAM sequence: TTC
tcctttgagtctttaaatct

SEQ ID NO: 26237 - DNA, 20 bp, Artificial Sequence
  Description of Artificial Sequence: Synthetic oligonucleotide
  Target: PCSK9; (+) strand; PAM type: YTN; PAM sequence: CTC
ctttgagtctttaaatcttg

SEQ ID NO: 26238 - DNA, 20 bp, Artificial Sequence
  Description of Artificial Sequence: Synthetic oligonucleotide
  Target: PCSK9; (+) strand; PAM type: YTN; PAM sequence: CTT
tgagtctttaaatcttgttg

SEQ ID NO: 26239 - DNA, 20 bp, Artificial Sequence
  Description of Artificial Sequence: Synthetic oligonucleotide
  Target: PCSK9; (+) strand; PAM type: YTN; PAM sequence: TTT
gagtctttaaatcttgttgt

SEQ ID NO: 26240 - DNA, 20 bp, Artificial Sequence
  Description of Artificial Sequence: Synthetic oligonucleotide
  Target: PCSK9; (+) strand; PAM type: YTN; PAM sequence: TTG
agtctttaaatcttgttgtc

SEQ ID NO: 26241 - DNA, 20 bp, Artificial Sequence
  Description of Artificial Sequence: Synthetic oligonucleotide
  Target: PCSK9; (+) strand; PAM type: YTN; PAM sequence: CTT
taaatcttgttgtctttctt

SEQ ID NO: 26242 - DNA, 20 bp, Artificial Sequence
  Description of Artificial Sequence: Synthetic oligonucleotide
  Target: PCSK9; (+) strand; PAM type: YTN; PAM sequence: TTT
aaatcttgttgtctttcttg

SEQ ID NO: 26243 - DNA, 20 bp, Artificial Sequence
  Description of Artificial Sequence: Synthetic oligonucleotide
  Target: PCSK9; (+) strand; PAM type: YTN; PAM sequence: TTA
aatcttgttgtctttcttgc

SEQ ID NO: 26244 - DNA, 20 bp, Artificial Sequence
  Description of Artificial Sequence: Synthetic oligonucleotide
  Target: PCSK9; (+) strand; PAM type: YTN; PAM sequence: CTT
gttgtctttcttgcagactc

SEQ ID NO: 26245 - DNA, 20 bp, Artificial Sequence
  Description of Artificial Sequence: Synthetic oligonucleotide
  Target: PCSK9; (+) strand; PAM type: YTN; PAM sequence: TTG
ttgtctttcttgcagactcg

SEQ ID NO: 26246 - DNA, 20 bp, Artificial Sequence
  Description of Artificial Sequence: Synthetic oligonucleotide
  Target: PCSK9; (+) strand; PAM type: YTN; PAM sequence: TTG
tctttcttgcagactcggtg

SEQ ID NO: 26247 - DNA, 20 bp, Artificial Sequence
  Description of Artificial Sequence: Synthetic oligonucleotide
  Target: PCSK9; (+) strand; PAM type: YTN; PAM sequence: CTT
tcttgcagactcggtgagct

SEQ ID NO: 26248 - DNA, 20 bp, Artificial Sequence
  Description of Artificial Sequence: Synthetic oligonucleotide
  Target: PCSK9; (+) strand; PAM type: YTN; PAM sequence: TTT
cttgcagactcggtgagctg

SEQ ID NO: 26249 - DNA, 20 bp, Artificial Sequence
  Description of Artificial Sequence: Synthetic oligonucleotide
  Target: PCSK9; (+) strand; PAM type: YTN; PAM sequence: TTC
ttgcagactcggtgagctgt

SEQ ID NO: 26250 - DNA, 20 bp, Artificial Sequence
  Description of Artificial Sequence: Synthetic oligonucleotide
  Target: PCSK9; (+) strand; PAM type: YTN; PAM sequence: CTT
gcagactcggtgagctgtga

SEQ ID NO: 26251 - DNA, 20 bp, Artificial Sequence
  Description of Artificial Sequence: Synthetic oligonucleotide
  Target: PCSK9; (+) strand; PAM type: YTN; PAM sequence: TTG
cagactcggtgagctgtgaa

SEQ ID NO: 26252 - DNA, 20 bp, Artificial Sequence
  Description of Artificial Sequence: Synthetic oligonucleotide
  Target: PCSK9; (+) strand; PAM type: YTN; PAM sequence: CTC
ggtgagctgtgaaaggctat

SEQ ID NO: 26253 - DNA, 20 bp, Artificial Sequence
  Description of Artificial Sequence: Synthetic oligonucleotide
  Target: PCSK9; (+) strand; PAM type: YTN; PAM sequence: CTG
tgaaaggctataataggggc

SEQ ID NO: 26254 - DNA, 20 bp, Artificial Sequence
  Description of Artificial Sequence: Synthetic oligonucleotide
  Target: PCSK9; (+) strand; PAM type: YTN; PAM sequence: CTA
taataggggctttattttac

SEQ ID NO: 26255 - DNA, 20 bp, Artificial Sequence
  Description of Artificial Sequence: Synthetic oligonucleotide
  Target: PCSK9; (+) strand; PAM type: YTN; PAM sequence: CTT
tattttacactttgatacta

SEQ ID NO: 26256 - DNA, 20 bp, Artificial Sequence
  Description of Artificial Sequence: Synthetic oligonucleotide
  Target: PCSK9; (+) strand; PAM type: YTN; PAM sequence: TTT
attttacactttgatactat

SEQ ID NO: 26257 - DNA, 20 bp, Artificial Sequence
  Description of Artificial Sequence: Synthetic oligonucleotide
  Target: PCSK9; (+) strand; PAM type: YTN; PAM sequence: TTA
ttttacactttgatactatt

SEQ ID NO: 26258 - DNA, 20 bp, Artificial Sequence
  Description of Artificial Sequence: Synthetic oligonucleotide
  Target: PCSK9; (+) strand; PAM type: YTN; PAM sequence: TTT
tacactttgatactattttt

SEQ ID NO: 26259 - DNA, 20 bp, Artificial Sequence
  Description of Artificial Sequence: Synthetic oligonucleotide
  Target: PCSK9; (+) strand; PAM type: YTN; PAM sequence: TTT
acactttgatactatttttt

SEQ ID NO: 26260 - DNA, 20 bp, Artificial Sequence
  Description of Artificial Sequence: Synthetic oligonucleotide
  Target: PCSK9; (+) strand; PAM type: YTN; PAM sequence: TTA
cactttgatactattttttg

SEQ ID NO: 26261 - DNA, 20 bp, Artificial Sequence
  Description of Artificial Sequence: Synthetic oligonucleotide
  Target: PCSK9; (+) strand; PAM type: YTN; PAM sequence: CTT
tgatactattttttgaacat

SEQ ID NO: 26262 - DNA, 20 bp, Artificial Sequence
  Description of Artificial Sequence: Synthetic oligonucleotide
  Target: PCSK9; (+) strand; PAM type: YTN; PAM sequence: TTT
gatactattttttgaacatt

SEQ ID NO: 26263 - DNA, 20 bp, Artificial Sequence
  Description of Artificial Sequence: Synthetic oligonucleotide
  Target: PCSK9; (+) strand; PAM type: YTN; PAM sequence: TTG
atactattttttgaacattc

SEQ ID NO: 26264 - DNA, 20 bp, Artificial Sequence
  Description of Artificial Sequence: Synthetic oligonucleotide
  Target: PCSK9; (+) strand; PAM type: YTN; PAM sequence: CTA
ttttttgaacattcatatta

SEQ ID NO: 26265 - DNA, 20 bp, Artificial Sequence
  Description of Artificial Sequence: Synthetic oligonucleotide
  Target: PCSK9; (+) strand; PAM type: YTN; PAM sequence: TTT
tttgaacattcatattattg

SEQ ID NO: 26266 - DNA, 20 bp, Artificial Sequence
  Description of Artificial Sequence: Synthetic oligonucleotide
  Target: PCSK9; (+) strand; PAM type: YTN; PAM sequence: TTT
ttgaacattcatattattgt

SEQ ID NO: 26267 - DNA, 20 bp, Artificial Sequence
  Description of Artificial Sequence: Synthetic oligonucleotide
  Target: PCSK9; (+) strand; PAM type: YTN; PAM sequence: TTT
tgaacattcatattattgtt

SEQ ID NO: 26268 - DNA, 20 bp, Artificial Sequence
  Description of Artificial Sequence: Synthetic oligonucleotide
  Target: PCSK9; (+) strand; PAM type: YTN; PAM sequence: TTT
gaacattcatattattgtta

SEQ ID NO: 26269 - DNA, 20 bp, Artificial Sequence
  Description of Artificial Sequence: Synthetic oligonucleotide
  Target: PCSK9; (+) strand; PAM type: YTN; PAM sequence: TTG
aacattcatattattgttag

SEQ ID NO: 26270 - DNA, 20 bp, Artificial Sequence
  Description of Artificial Sequence: Synthetic oligonucleotide
  Target: PCSK9; (+) strand; PAM type: YTN; PAM sequence: TTC
atattattgttagatattga

SEQ ID NO: 26271 - DNA, 20 bp, Artificial Sequence
  Description of Artificial Sequence: Synthetic oligonucleotide
  Target: PCSK9; (+) strand; PAM type: YTN; PAM sequence: TTA
ttgttagatattgatattca

SEQ ID NO: 26272 - DNA, 20 bp, Artificial Sequence
  Description of Artificial Sequence: Synthetic oligonucleotide
  Target: PCSK9; (+) strand; PAM type: YTN; PAM sequence: TTG
ttagatattgatattcatat

SEQ ID NO: 26273 - DNA, 20 bp, Artificial Sequence
  Description of Artificial Sequence: Synthetic oligonucleotide
  Target: PCSK9; (+) strand; PAM type: YTN; PAM sequence: TTA
gatattgatattcatatgaa

SEQ ID NO: 26274 - DNA, 20 bp, Artificial Sequence
  Description of Artificial Sequence: Synthetic oligonucleotide
  Target: PCSK9; (+) strand; PAM type: YTN; PAM sequence: TTG
atattcatatgaaggagcag

SEQ ID NO: 26275 - DNA, 20 bp, Artificial Sequence
  Description of Artificial Sequence: Synthetic oligonucleotide
  Target: PCSK9; (+) strand; PAM type: YTN; PAM sequence: TTC
atatgaaggagcaggatgac

SEQ ID NO: 26276 - DNA, 20 bp, Artificial Sequence
  Description of Artificial Sequence: Synthetic oligonucleotide
  Target: PCSK9; (+) strand; PAM type: YTN; PAM sequence: CTT
gggtccttcttggcagtagc

SEQ ID NO: 26277 - DNA, 20 bp, Artificial Sequence
  Description of Artificial Sequence: Synthetic oligonucleotide
  Target: PCSK9; (+) strand; PAM type: YTN; PAM sequence: TTG
ggtccttcttggcagtagca

SEQ ID NO: 26278 - DNA, 20 bp, Artificial Sequence
  Description of Artificial Sequence: Synthetic oligonucleotide
  Target: PCSK9; (+) strand; PAM type: YTN; PAM sequence: CTT
cttggcagtagcattgccag

SEQ ID NO: 26279 - DNA, 20 bp, Artificial Sequence
  Description of Artificial Sequence: Synthetic oligonucleotide
  Target: PCSK9; (+) strand; PAM type: YTN; PAM sequence: TTC
ttggcagtagcattgccagc

SEQ ID NO: 26280 - DNA, 20 bp, Artificial Sequence
  Description of Artificial Sequence: Synthetic oligonucleotide
  Target: PCSK9; (+) strand; PAM type: YTN; PAM sequence: CTT
ggcagtagcattgccagctg

SEQ ID NO: 26281 - DNA, 20 bp, Artificial Sequence
  Description of Artificial Sequence: Synthetic oligonucleotide
  Target: PCSK9; (+) strand; PAM type: YTN; PAM sequence: TTG
gcagtagcattgccagctga

SEQ ID NO: 26282 - DNA, 20 bp, Artificial Sequence
  Description of Artificial Sequence: Synthetic oligonucleotide
  Target: PCSK9; (+) strand; PAM type: YTN; PAM sequence: TTG
ccagctgatggccttggaca

SEQ ID NO: 26283 - DNA, 20 bp, Artificial Sequence
  Description of Artificial Sequence: Synthetic oligonucleotide
  Target: PCSK9; (+) strand; PAM type: YTN; PAM sequence: CTG
atggccttggacagttacct

SEQ ID NO: 26284 - DNA, 20 bp, Artificial Sequence
  Description of Artificial Sequence: Synthetic oligonucleotide
  Target: PCSK9; (+) strand; PAM type: YTN; PAM sequence: CTT
ggacagttacctgccctctc

SEQ ID NO: 26285 - DNA, 20 bp, Artificial Sequence
  Description of Artificial Sequence: Synthetic oligonucleotide
  Target: PCSK9; (+) strand; PAM type: YTN; PAM sequence: TTG
gacagttacctgccctctct

SEQ ID NO: 26286 - DNA, 20 bp, Artificial Sequence
  Description of Artificial Sequence: Synthetic oligonucleotide
  Target: PCSK9; (+) strand; PAM type: YTN; PAM sequence: TTA
cctgccctctctaggcctcc

SEQ ID NO: 26287 - DNA, 20 bp, Artificial Sequence
  Description of Artificial Sequence: Synthetic oligonucleotide
  Target: PCSK9; (+) strand; PAM type: YTN; PAM sequence: CTG
ccctctctaggcctcccttt

SEQ ID NO: 26288 - DNA, 20 bp, Artificial Sequence
  Description of Artificial Sequence: Synthetic oligonucleotide
  Target: PCSK9; (+) strand; PAM type: YTN; PAM sequence: CTC
tctaggcctccctttccttg

SEQ ID NO: 26289 - DNA, 20 bp, Artificial Sequence
  Description of Artificial Sequence: Synthetic oligonucleotide
  Target: PCSK9; (+) strand; PAM type: YTN; PAM sequence: CTC
taggcctccctttccttgtc

SEQ ID NO: 26290 - DNA, 20 bp, Artificial Sequence
  Description of Artificial Sequence: Synthetic oligonucleotide
  Target: PCSK9; (+) strand; PAM type: YTN; PAM sequence: CTA
ggcctccctttccttgtcta

SEQ ID NO: 26291 - DNA, 20 bp, Artificial Sequence
  Description of Artificial Sequence: Synthetic oligonucleotide
  Target: PCSK9; (+) strand; PAM type: YTN; PAM sequence: CTC
cctttccttgtctatgaaat

SEQ ID NO: 26292 - DNA, 20 bp, Artificial Sequence
  Description of Artificial Sequence: Synthetic oligonucleotide
  Target: PCSK9; (+) strand; PAM type: YTN; PAM sequence: CTT
tccttgtctatgaaatacat

SEQ ID NO: 26293 - DNA, 20 bp, Artificial Sequence
  Description of Artificial Sequence: Synthetic oligonucleotide
  Target: PCSK9; (+) strand; PAM type: YTN; PAM sequence: TTT
ccttgtctatgaaatacatt

SEQ ID NO: 26294 - DNA, 20 bp, Artificial Sequence
  Description of Artificial Sequence: Synthetic oligonucleotide
  Target: PCSK9; (+) strand; PAM type: YTN; PAM sequence: TTC
cttgtctatgaaatacatta

SEQ ID NO: 26295 - DNA, 20 bp, Artificial Sequence
  Description of Artificial Sequence: Synthetic oligonucleotide
  Target: PCSK9; (+) strand; PAM type: YTN; PAM sequence: CTT
gtctatgaaatacattatag

SEQ ID NO: 26296 - DNA, 20 bp, Artificial Sequence
  Description of Artificial Sequence: Synthetic oligonucleotide
  Target: PCSK9; (+) strand; PAM type: YTN; PAM sequence: TTG
tctatgaaatacattataga

SEQ ID NO: 26297 - DNA, 20 bp, Artificial Sequence
  Description of Artificial Sequence: Synthetic oligonucleotide
  Target: PCSK9; (+) strand; PAM type: YTN; PAM sequence: CTA
tgaaatacattatagaatag

SEQ ID NO: 26298 - DNA, 20 bp, Artificial Sequence
  Description of Artificial Sequence: Synthetic oligonucleotide
  Target: PCSK9; (+) strand; PAM type: YTN; PAM sequence: TTA
tagaataggatgtagtgtgt

SEQ ID NO: 26299 - DNA, 20 bp, Artificial Sequence
  Description of Artificial Sequence: Synthetic oligonucleotide
  Target: PCSK9; (+) strand; PAM type: YTN; PAM sequence: TTT
tttggaggttaaacgagtga

SEQ ID NO: 26300 - DNA, 20 bp, Artificial Sequence
  Description of Artificial Sequence: Synthetic oligonucleotide
  Target: PCSK9; (+) strand; PAM type: YTN; PAM sequence: TTT
ttggaggttaaacgagtgaa

SEQ ID NO: 26301 - DNA, 20 bp, Artificial Sequence
  Description of Artificial Sequence: Synthetic oligonucleotide
  Target: PCSK9; (+) strand; PAM type: YTN; PAM sequence: TTT
tggaggttaaacgagtgaat

SEQ ID NO: 26302 - DNA, 20 bp, Artificial Sequence
  Description of Artificial Sequence: Synthetic oligonucleotide
  Target: PCSK9; (+) strand; PAM type: YTN; PAM sequence: TTT
ggaggttaaacgagtgaata

SEQ ID NO: 26303 - DNA, 20 bp, Artificial Sequence
  Description of Artificial Sequence: Synthetic oligonucleotide
  Target: PCSK9; (+) strand; PAM type: YTN; PAM sequence: TTG
gaggttaaacgagtgaatat

SEQ ID NO: 26304 - DNA, 20 bp, Artificial Sequence
  Description of Artificial Sequence: Synthetic oligonucleotide
  Target: PCSK9; (+) strand; PAM type: YTN; PAM sequence: TTA
aacgagtgaatatatttaag

SEQ ID NO: 26305 - DNA, 20 bp, Artificial Sequence
  Description of Artificial Sequence: Synthetic oligonucleotide
  Target: PCSK9; (+) strand; PAM type: YTN; PAM sequence: TTT
aaggcgctttcaccagtgcc

SEQ ID NO: 26306 - DNA, 20 bp, Artificial Sequence
  Description of Artificial Sequence: Synthetic oligonucleotide
  Target: PCSK9; (+) strand; PAM type: YTN; PAM sequence: TTA
aggcgctttcaccagtgcct

SEQ ID NO: 26307 - DNA, 20 bp, Artificial Sequence
  Description of Artificial Sequence: Synthetic oligonucleotide
  Target: PCSK9; (+) strand; PAM type: YTN; PAM sequence: CTT
tcaccagtgcctgggatgtg

SEQ ID NO: 26308 - DNA, 20 bp, Artificial Sequence
  Description of Artificial Sequence: Synthetic oligonucleotide
  Target: PCSK9; (+) strand; PAM type: YTN; PAM sequence: TTT
caccagtgcctgggatgtgc

SEQ ID NO: 26309 - DNA, 20 bp, Artificial Sequence
  Description of Artificial Sequence: Synthetic oligonucleotide
  Target: PCSK9; (+) strand; PAM type: YTN; PAM sequence: TTC
accagtgcctgggatgtgct

SEQ ID NO: 26310 - DNA, 20 bp, Artificial Sequence
  Description of Artificial Sequence: Synthetic oligonucleotide
  Target: PCSK9; (+) strand; PAM type: YTN; PAM sequence: CTG
ggatgtgctctgtagtttct

SEQ ID NO: 26311 - DNA, 20 bp, Artificial Sequence
  Description of Artificial Sequence: Synthetic oligonucleotide
  Target: PCSK9; (+) strand; PAM type: YTN; PAM sequence: CTC
tgtagtttctgtgtgttaac

SEQ ID NO: 26312 - DNA, 20 bp, Artificial Sequence
  Description of Artificial Sequence: Synthetic oligonucleotide
  Target: PCSK9; (+) strand; PAM type: YTN; PAM sequence: CTG
tagtttctgtgtgttaacta

SEQ ID NO: 26313 - DNA, 20 bp, Artificial Sequence
  Description of Artificial Sequence: Synthetic oligonucleotide
  Target: PCSK9; (+) strand; PAM type: YTN; PAM sequence: TTT
ctgtgtgttaactataaggt

SEQ ID NO: 26314 - DNA, 20 bp, Artificial Sequence
  Description of Artificial Sequence: Synthetic oligonucleotide
  Target: PCSK9; (+) strand; PAM type: YTN; PAM sequence: TTC
tgtgtgttaactataaggtt

SEQ ID NO: 26315 - DNA, 20 bp, Artificial Sequence
  Description of Artificial Sequence: Synthetic oligonucleotide
  Target: PCSK9; (+) strand; PAM type: YTN; PAM sequence: CTG
tgtgttaactataaggttga

SEQ ID NO: 26316 - DNA, 20 bp, Artificial Sequence
  Description of Artificial Sequence: Synthetic oligonucleotide
  Target: PCSK9; (+) strand; PAM type: YTN; PAM sequence: TTA
actataaggttgactttatg

SEQ ID NO: 26317 - DNA, 20 bp, Artificial Sequence
  Description of Artificial Sequence: Synthetic oligonucleotide
  Target: PCSK9; (+) strand; PAM type: YTN; PAM sequence: CTA
taaggttgactttatgctca

SEQ ID NO: 26318 - DNA, 20 bp, Artificial Sequence
  Description of Artificial Sequence: Synthetic oligonucleotide
  Target: PCSK9; (+) strand; PAM type: YTN; PAM sequence: TTG
actttatgctcattccctcc

SEQ ID NO: 26319 - DNA, 20 bp, Artificial Sequence
  Description of Artificial Sequence: Synthetic oligonucleotide
  Target: PCSK9; (+) strand; PAM type: YTN; PAM sequence: CTT
tatgctcattccctcctctc

SEQ ID NO: 26320 - DNA, 20 bp, Artificial Sequence
  Description of Artificial Sequence: Synthetic oligonucleotide
  Target: PCSK9; (+) strand; PAM type: YTN; PAM sequence: TTT
atgctcattccctcctctcc

SEQ ID NO: 26321 - DNA, 20 bp, Artificial Sequence
  Description of Artificial Sequence: Synthetic oligonucleotide
  Target: PCSK9; (+) strand; PAM type: YTN; PAM sequence: TTA
tgctcattccctcctctccc

SEQ ID NO: 26322 - DNA, 20 bp, Artificial Sequence
  Description of Artificial Sequence: Synthetic oligonucleotide
  Target: PCSK9; (+) strand; PAM type: YTN; PAM sequence: CTC
attccctcctctcccacaaa

SEQ ID NO: 26323 - DNA, 20 bp, Artificial Sequence
  Description of Artificial Sequence: Synthetic oligonucleotide
  Target: PCSK9; (+) strand; PAM type: YTN; PAM sequence: TTC
cctcctctcccacaaatgtc

SEQ ID NO: 26324 - DNA, 20 bp, Artificial Sequence
  Description of Artificial Sequence: Synthetic oligonucleotide
  Target: PCSK9; (+) strand; PAM type: YTN; PAM sequence: CTC
ctctcccacaaatgtcgcct

SEQ ID NO: 26325 - DNA, 20 bp, Artificial Sequence
  Description of Artificial Sequence: Synthetic oligonucleotide
  Target: PCSK9; (+) strand; PAM type: YTN; PAM sequence: CTC
tcccacaaatgtcgccttgg

SEQ ID NO: 26326 - DNA, 20 bp, Artificial Sequence
  Description of Artificial Sequence: Synthetic oligonucleotide
  Target: PCSK9; (+) strand; PAM type: YTN; PAM sequence: CTC
ccacaaatgtcgccttggaa

SEQ ID NO: 26327 - DNA, 20 bp, Artificial Sequence
  Description of Artificial Sequence: Synthetic oligonucleotide
  Target: PCSK9; (+) strand; PAM type: YTN; PAM sequence: CTT
ggaaagacggaggcagcctg

SEQ ID NO: 26328 - DNA, 20 bp, Artificial Sequence
  Description of Artificial Sequence: Synthetic oligonucleotide
  Target: PCSK9; (+) strand; PAM type: YTN; PAM sequence: TTG
gaaagacggaggcagcctgg

SEQ ID NO: 26329 - DNA, 20 bp, Artificial Sequence
  Description of Artificial Sequence: Synthetic oligonucleotide
  Target: PCSK9; (+) strand; PAM type: YTN; PAM sequence: CTG
gtggaggtgtatctcctaga

SEQ ID NO: 26330 - DNA, 20 bp, Artificial Sequence
  Description of Artificial Sequence: Synthetic oligonucleotide
  Target: PCSK9; (+) strand; PAM type: YTN; PAM sequence: CTC
ctagacaccagcatacagag

SEQ ID NO: 26331 - DNA, 20 bp, Artificial Sequence
  Description of Artificial Sequence: Synthetic oligonucleotide
  Target: PCSK9; (+) strand; PAM type: YTN; PAM sequence: CTA
gacaccagcatacagagtga

SEQ ID NO: 26332 - DNA, 20 bp, Artificial Sequence
  Description of Artificial Sequence: Synthetic oligonucleotide
  Target: PCSK9; (+) strand; PAM type: YTN; PAM sequence: CTT
cgagaatgtgcccgaggagg

SEQ ID NO: 26333 - DNA, 20 bp, Artificial Sequence
  Description of Artificial Sequence: Synthetic oligonucleotide
  Target: PCSK9; (+) strand; PAM type: YTN; PAM sequence: TTC
gagaatgtgcccgaggagga

SEQ ID NO: 26334 - DNA, 20 bp, Artificial Sequence
  Description of Artificial Sequence: Synthetic oligonucleotide
  Target: PCSK9; (+) strand; PAM type: YTN; PAM sequence: CTT
ccacagacaggtaagcacgg

SEQ ID NO: 26335 - DNA, 20 bp, Artificial Sequence
  Description of Artificial Sequence: Synthetic oligonucleotide
  Target: PCSK9; (+) strand; PAM type: YTN; PAM sequence: TTC
cacagacaggtaagcacggc

SEQ ID NO: 26336 - DNA, 20 bp, Artificial Sequence
  Description of Artificial Sequence: Synthetic oligonucleotide
  Target: PCSK9; (+) strand; PAM type: YTN; PAM sequence: CTG
atgggagggctgcctctgcc

SEQ ID NO: 26337 - DNA, 20 bp, Artificial Sequence
  Description of Artificial Sequence: Synthetic oligonucleotide
  Target: PCSK9; (+) strand; PAM type: YTN; PAM sequence: CTG
cctctgcccatatccccatc

SEQ ID NO: 26338 - DNA, 20 bp, Artificial Sequence
  Description of Artificial Sequence: Synthetic oligonucleotide
  Target: PCSK9; (+) strand; PAM type: YTN; PAM sequence: CTC
tgcccatatccccatcctgg

SEQ ID NO: 26339 - DNA, 20 bp, Artificial Sequence
  Description of Artificial Sequence: Synthetic oligonucleotide
  Target: PCSK9; (+) strand; PAM type: YTN; PAM sequence: CTG
cccatatccccatcctggag

SEQ ID NO: 26340 - DNA, 20 bp, Artificial Sequence
  Description of Artificial Sequence: Synthetic oligonucleotide
  Target: PCSK9; (+) strand; PAM type: YTN; PAM sequence: CTG
gaggtgggtggggactgcca

SEQ ID NO: 26341 - DNA, 20 bp, Artificial Sequence
  Description of Artificial Sequence: Synthetic oligonucleotide
  Target: PCSK9; (+) strand; PAM type: YTN; PAM sequence: CTG
ccaccccagagcgttgcagc

SEQ ID NO: 26342 - DNA, 20 bp, Artificial Sequence
  Description of Artificial Sequence: Synthetic oligonucleotide
  Target: PCSK9; (+) strand; PAM type: YTN; PAM sequence: TTG
cagctgtactcctgggttgc

SEQ ID NO: 26343 - DNA, 20 bp, Artificial Sequence
  Description of Artificial Sequence: Synthetic oligonucleotide
  Target: PCSK9; (+) strand; PAM type: YTN; PAM sequence: CTG
tactcctgggttgcaccccc

SEQ ID NO: 26344 - DNA, 20 bp, Artificial Sequence
  Description of Artificial Sequence: Synthetic oligonucleotide
  Target: PCSK9; (+) strand; PAM type: YTN; PAM sequence: CTC
ctgggttgcaccccccccag

SEQ ID NO: 26345 - DNA, 20 bp, Artificial Sequence
  Description of Artificial Sequence: Synthetic oligonucleotide
  Target: PCSK9; (+) strand; PAM type: YTN; PAM sequence: CTG
ggttgcaccccccccagctg

SEQ ID NO: 26346 - DNA, 20 bp, Artificial Sequence
  Description of Artificial Sequence: Synthetic oligonucleotide
  Target: PCSK9; (+) strand; PAM type: YTN; PAM sequence: TTG
caccccccccagctgtcact

SEQ ID NO: 26347 - DNA, 20 bp, Artificial Sequence
  Description of Artificial Sequence: Synthetic oligonucleotide
  Target: PCSK9; (+) strand; PAM type: YTN; PAM sequence: CTG
tcactgtcccctccctgcca

SEQ ID NO: 26348 - DNA, 20 bp, Artificial Sequence
  Description of Artificial Sequence: Synthetic oligonucleotide
  Target: PCSK9; (+) strand; PAM type: YTN; PAM sequence: CTG
tcccctccctgccatcagtt

SEQ ID NO: 26349 - DNA, 20 bp, Artificial Sequence
  Description of Artificial Sequence: Synthetic oligonucleotide
  Target: PCSK9; (+) strand; PAM type: YTN; PAM sequence: CTC
cctgccatcagttgtgggaa

SEQ ID NO: 26350 - DNA, 20 bp, Artificial Sequence
  Description of Artificial Sequence: Synthetic oligonucleotide
  Target: PCSK9; (+) strand; PAM type: YTN; PAM sequence: CTG
ccatcagttgtgggaagggc

SEQ ID NO: 26351 - DNA, 20 bp, Artificial Sequence
  Description of Artificial Sequence: Synthetic oligonucleotide
  Target: PCSK9; (+) strand; PAM type: YTN; PAM sequence: TTG
tgggaagggcgttcatccat

SEQ ID NO: 26352 - DNA, 20 bp, Artificial Sequence
  Description of Artificial Sequence: Synthetic oligonucleotide
  Target: PCSK9; (+) strand; PAM type: YTN; PAM sequence: TTC
atccatccagccacctgctg

SEQ ID NO: 26353 - DNA, 20 bp, Artificial Sequence
  Description of Artificial Sequence: Synthetic oligonucleotide
  Target: PCSK9; (+) strand; PAM type: YTN; PAM sequence: CTG
ctgatttgttatagggtgga

SEQ ID NO: 26354 - DNA, 20 bp, Artificial Sequence
  Description of Artificial Sequence: Synthetic oligonucleotide
  Target: PCSK9; (+) strand; PAM type: YTN; PAM sequence: CTG
atttgttatagggtggaggg

SEQ ID NO: 26355 - DNA, 20 bp, Artificial Sequence
  Description of Artificial Sequence: Synthetic oligonucleotide
  Target: PCSK9; (+) strand; PAM type: YTN; PAM sequence: TTT
gttatagggtggaggggggg

SEQ ID NO: 26356 - DNA, 20 bp, Artificial Sequence
  Description of Artificial Sequence: Synthetic oligonucleotide
  Target: PCSK9; (+) strand; PAM type: YTN; PAM sequence: TTG
ttatagggtggagggggggt

SEQ ID NO: 26357 - DNA, 20 bp, Artificial Sequence
  Description of Artificial Sequence: Synthetic oligonucleotide
  Target: PCSK9; (+) strand; PAM type: YTN; PAM sequence: TTA
tagggtggagggggggtctt

SEQ ID NO: 26358 - DNA, 20 bp, Artificial Sequence
  Description of Artificial Sequence: Synthetic oligonucleotide
  Target: PCSK9; (+) strand; PAM type: YTN; PAM sequence: CTT
tctcatgtggtccttgtgtt

SEQ ID NO: 26359 - DNA, 20 bp, Artificial Sequence
  Description of Artificial Sequence: Synthetic oligonucleotide
  Target: PCSK9; (+) strand; PAM type: YTN; PAM sequence: TTT
ctcatgtggtccttgtgttc

SEQ ID NO: 26360 - DNA, 20 bp, Artificial Sequence
  Description of Artificial Sequence: Synthetic oligonucleotide
  Target: PCSK9; (+) strand; PAM type: YTN; PAM sequence: TTC
tcatgtggtccttgtgttcg

SEQ ID NO: 26361 - DNA, 20 bp, Artificial Sequence
  Description of Artificial Sequence: Synthetic oligonucleotide
  Target: PCSK9; (+) strand; PAM type: YTN; PAM sequence: CTC
atgtggtccttgtgttcgtc

SEQ ID NO: 26362 - DNA, 20 bp, Artificial Sequence
  Description of Artificial Sequence: Synthetic oligonucleotide
  Target: PCSK9; (+) strand; PAM type: YTN; PAM sequence: CTT
gtgttcgtcgagcaggccag

SEQ ID NO: 26363 - DNA, 20 bp, Artificial Sequence
  Description of Artificial Sequence: Synthetic oligonucleotide
  Target: PCSK9; (+) strand; PAM type: YTN; PAM sequence: TTG
tgttcgtcgagcaggccagc

SEQ ID NO: 26364 - DNA, 20 bp, Artificial Sequence
  Description of Artificial Sequence: Synthetic oligonucleotide
  Target: PCSK9; (+) strand; PAM type: YTN; PAM sequence: TTC
gtcgagcaggccagcaagtg

SEQ ID NO: 26365 - DNA, 20 bp, Artificial Sequence
  Description of Artificial Sequence: Synthetic oligonucleotide
  Target: PCSK9; (+) strand; PAM type: YTN; PAM sequence: CTG
gcaggggtggtcagcggccg

SEQ ID NO: 26366 - DNA, 20 bp, Artificial Sequence
  Description of Artificial Sequence: Synthetic oligonucleotide
  Target: PCSK9; (+) strand; PAM type: YTN; PAM sequence: CTG
cgcgtgctcaactgccaagg

SEQ ID NO: 26367 - DNA, 20 bp, Artificial Sequence
  Description of Artificial Sequence: Synthetic oligonucleotide
  Target: PCSK9; (+) strand; PAM type: YTN; PAM sequence: CTC
aactgccaagggaagggcac

SEQ ID NO: 26368 - DNA, 20 bp, Artificial Sequence
  Description of Artificial Sequence: Synthetic oligonucleotide
  Target: PCSK9; (+) strand; PAM type: YTN; PAM sequence: CTG
ccaagggaagggcacggtta

SEQ ID NO: 26369 - DNA, 20 bp, Artificial Sequence
  Description of Artificial Sequence: Synthetic oligonucleotide
  Target: PCSK9; (+) strand; PAM type: YTN; PAM sequence: TTA
gcggcaccctcataggtaag

SEQ ID NO: 26370 - DNA, 20 bp, Artificial Sequence
  Description of Artificial Sequence: Synthetic oligonucleotide
  Target: PCSK9; (+) strand; PAM type: YTN; PAM sequence: CTC
ataggtaagtgatggcccca

SEQ ID NO: 26371 - DNA, 20 bp, Artificial Sequence
  Description of Artificial Sequence: Synthetic oligonucleotide
  Target: PCSK9; (+) strand; PAM type: YTN; PAM sequence: CTG
gtctctctccatctggacct

SEQ ID NO: 26372 - DNA, 20 bp, Artificial Sequence
  Description of Artificial Sequence: Synthetic oligonucleotide
  Target: PCSK9; (+) strand; PAM type: YTN; PAM sequence: CTC
tctccatctggacctggcct

SEQ ID NO: 26373 - DNA, 20 bp, Artificial Sequence
  Description of Artificial Sequence: Synthetic oligonucleotide
  Target: PCSK9; (+) strand; PAM type: YTN; PAM sequence: CTC
tccatctggacctggcctgg

SEQ ID NO: 26374 - DNA, 20 bp, Artificial Sequence
  Description of Artificial Sequence: Synthetic oligonucleotide
  Target: PCSK9; (+) strand; PAM type: YTN; PAM sequence: CTC
catctggacctggcctggga

SEQ ID NO: 26375 - DNA, 20 bp, Artificial Sequence
  Description of Artificial Sequence: Synthetic oligonucleotide
  Target: PCSK9; (+) strand; PAM type: YTN; PAM sequence: CTG
gacctggcctgggaggtggc

SEQ ID NO: 26376 - DNA, 20 bp, Artificial Sequence
  Description of Artificial Sequence: Synthetic oligonucleotide
  Target: PCSK9; (+) strand; PAM type: YTN; PAM sequence: CTG
gcctgggaggtggcttgggc

SEQ ID NO: 26377 - DNA, 20 bp, Artificial Sequence
  Description of Artificial Sequence: Synthetic oligonucleotide
  Target: PCSK9; (+) strand; PAM type: YTN; PAM sequence: CTG
ggaggtggcttgggctgggc

SEQ ID NO: 26378 - DNA, 20 bp, Artificial Sequence
  Description of Artificial Sequence: Synthetic oligonucleotide
  Target: PCSK9; (+) strand; PAM type: YTN; PAM sequence: CTT
gggctgggcccagggagagc

SEQ ID NO: 26379 - DNA, 20 bp, Artificial Sequence
  Description of Artificial Sequence: Synthetic oligonucleotide
  Target: PCSK9; (+) strand; PAM type: YTN; PAM sequence: TTG
ggctgggcccagggagagct

SEQ ID NO: 26380 - DNA, 20 bp, Artificial Sequence
  Description of Artificial Sequence: Synthetic oligonucleotide
  Target: PCSK9; (+) strand; PAM type: YTN; PAM sequence: CTG
ggcccagggagagctaatgt

SEQ ID NO: 26381 - DNA, 20 bp, Artificial Sequence
  Description of Artificial Sequence: Synthetic oligonucleotide
  Target: PCSK9; (+) strand; PAM type: YTN; PAM sequence: CTA
atgtctcctaaccaagaatg

SEQ ID NO: 26382 - DNA, 20 bp, Artificial Sequence
  Description of Artificial Sequence: Synthetic oligonucleotide
  Target: PCSK9; (+) strand; PAM type: YTN; PAM sequence: CTC
ctaaccaagaatgctgtggc

SEQ ID NO: 26383 - DNA, 20 bp, Artificial Sequence
  Description of Artificial Sequence: Synthetic oligonucleotide
  Target: PCSK9; (+) strand; PAM type: YTN; PAM sequence: CTA
accaagaatgctgtggcagc

SEQ ID NO: 26384 - DNA, 20 bp, Artificial Sequence
  Description of Artificial Sequence: Synthetic oligonucleotide
  Target: PCSK9; (+) strand; PAM type: YTN; PAM sequence: CTG
tggcagcctctgccgcagag

SEQ ID NO: 26385 - DNA, 20 bp, Artificial Sequence
  Description of Artificial Sequence: Synthetic oligonucleotide
  Target: PCSK9; (+) strand; PAM type: YTN; PAM sequence: CTC
tgccgcagagccagagaacc

SEQ ID NO: 26386 - DNA, 20 bp, Artificial Sequence
  Description of Artificial Sequence: Synthetic oligonucleotide
  Target: PCSK9; (+) strand; PAM type: YTN; PAM sequence: CTG
ccgcagagccagagaaccag

SEQ ID NO: 26387 - DNA, 20 bp, Artificial Sequence
  Description of Artificial Sequence: Synthetic oligonucleotide
  Target: PCSK9; (+) strand; PAM type: YTN; PAM sequence: CTG
gcagggttcccagtggccac

SEQ ID NO: 26388 - DNA, 20 bp, Artificial Sequence
  Description of Artificial Sequence: Synthetic oligonucleotide
  Target: PCSK9; (+) strand; PAM type: YTN; PAM sequence: TTC
ccagtggccacgagtgcaga

SEQ ID NO: 26389 - DNA, 20 bp, Artificial Sequence
  Description of Artificial Sequence: Synthetic oligonucleotide
  Target: PCSK9; (+) strand; PAM type: YTN; PAM sequence: TTC
agccttgaccctgggtcaat

SEQ ID NO: 26390 - DNA, 20 bp, Artificial Sequence
  Description of Artificial Sequence: Synthetic oligonucleotide
  Target: PCSK9; (+) strand; PAM type: YTN; PAM sequence: CTT
gaccctgggtcaatgacctt

SEQ ID NO: 26391 - DNA, 20 bp, Artificial Sequence
  Description of Artificial Sequence: Synthetic oligonucleotide
  Target: PCSK9; (+) strand; PAM type: YTN; PAM sequence: TTG
accctgggtcaatgaccttt

SEQ ID NO: 26392 - DNA, 20 bp, Artificial Sequence
  Description of Artificial Sequence: Synthetic oligonucleotide
  Target: PCSK9; (+) strand; PAM type: YTN; PAM sequence: CTG
ggtcaatgacctttccacag

SEQ ID NO: 26393 - DNA, 20 bp, Artificial Sequence
  Description of Artificial Sequence: Synthetic oligonucleotide
  Target: PCSK9; (+) strand; PAM type: YTN; PAM sequence: CTT
tccacagttccacactgctc

SEQ ID NO: 26394 - DNA, 20 bp, Artificial Sequence
  Description of Artificial Sequence: Synthetic oligonucleotide
  Target: PCSK9; (+) strand; PAM type: YTN; PAM sequence: TTT
ccacagttccacactgctcc

SEQ ID NO: 26395 - DNA, 20 bp, Artificial Sequence
  Description of Artificial Sequence: Synthetic oligonucleotide
  Target: PCSK9; (+) strand; PAM type: YTN; PAM sequence: TTC
cacagttccacactgctccc

SEQ ID NO: 26396 - DNA, 20 bp, Artificial Sequence
  Description of Artificial Sequence: Synthetic oligonucleotide
  Target: PCSK9; (+) strand; PAM type: YTN; PAM sequence: TTC
cacactgctccccttttaaa

SEQ ID NO: 26397 - DNA, 20 bp, Artificial Sequence
  Description of Artificial Sequence: Synthetic oligonucleotide
  Target: PCSK9; (+) strand; PAM type: YTN; PAM sequence: CTG
ctccccttttaaaatccggt

SEQ ID NO: 26398 - DNA, 20 bp, Artificial Sequence
  Description of Artificial Sequence: Synthetic oligonucleotide
  Target: PCSK9; (+) strand; PAM type: YTN; PAM sequence: CTC
cccttttaaaatccggtgat

SEQ ID NO: 26399 - DNA, 20 bp, Artificial Sequence
  Description of Artificial Sequence: Synthetic oligonucleotide
  Target: PCSK9; (+) strand; PAM type: YTN; PAM sequence: CTT
ttaaaatccggtgatgtctt

SEQ ID NO: 26400 - DNA, 20 bp, Artificial Sequence
  Description of Artificial Sequence: Synthetic oligonucleotide
  Target: PCSK9; (+) strand; PAM type: YTN; PAM sequence: TTT
taaaatccggtgatgtcttt

SEQ ID NO: 26401 - DNA, 20 bp, Artificial Sequence
  Description of Artificial Sequence: Synthetic oligonucleotide
  Target: PCSK9; (+) strand; PAM type: YTN; PAM sequence: TTT
aaaatccggtgatgtcttta

SEQ ID NO: 26402 - DNA, 20 bp, Artificial Sequence
  Description of Artificial Sequence: Synthetic oligonucleotide
  Target: PCSK9; (+) strand; PAM type: YTN; PAM sequence: TTA
aaatccggtgatgtctttat

SEQ ID NO: 26403 - DNA, 20 bp, Artificial Sequence
  Description of Artificial Sequence: Synthetic oligonucleotide
  Target: PCSK9; (+) strand; PAM type: YTN; PAM sequence: CTT
tatgtcttttgttatgttat

SEQ ID NO: 26404 - DNA, 20 bp, Artificial Sequence
  Description of Artificial Sequence: Synthetic oligonucleotide
  Target: PCSK9; (+) strand; PAM type: YTN; PAM sequence: TTT
atgtcttttgttatgttatc

SEQ ID NO: 26405 - DNA, 20 bp, Artificial Sequence
  Description of Artificial Sequence: Synthetic oligonucleotide
  Target: PCSK9; (+) strand; PAM type: YTN; PAM sequence: TTA
tgtcttttgttatgttatct

SEQ ID NO: 26406 - DNA, 20 bp, Artificial Sequence
  Description of Artificial Sequence: Synthetic oligonucleotide
  Target: PCSK9; (+) strand; PAM type: YTN; PAM sequence: CTT
ttgttatgttatcttcaatg

SEQ ID NO: 26407 - DNA, 20 bp, Artificial Sequence
  Description of Artificial Sequence: Synthetic oligonucleotide
  Target: PCSK9; (+) strand; PAM type: YTN; PAM sequence: TTT
tgttatgttatcttcaatgt

SEQ ID NO: 26408 - DNA, 20 bp, Artificial Sequence
  Description of Artificial Sequence: Synthetic oligonucleotide
  Target: PCSK9; (+) strand; PAM type: YTN; PAM sequence: TTT
gttatgttatcttcaatgtg

SEQ ID NO: 26409 - DNA, 20 bp, Artificial Sequence
  Description of Artificial Sequence: Synthetic oligonucleotide
  Target: PCSK9; (+) strand; PAM type: YTN; PAM sequence: TTG
ttatgttatcttcaatgtgg

SEQ ID NO: 26410 - DNA, 20 bp, Artificial Sequence
  Description of Artificial Sequence: Synthetic oligonucleotide
  Target: PCSK9; (+) strand; PAM type: YTN; PAM sequence: TTA
tgttatcttcaatgtggagg

SEQ ID NO: 26411 - DNA, 20 bp, Artificial Sequence
  Description of Artificial Sequence: Synthetic oligonucleotide
  Target: PCSK9; (+) strand; PAM type: YTN; PAM sequence: TTA
tcttcaatgtggagggactc

SEQ ID NO: 26412 - DNA, 20 bp, Artificial Sequence
  Description of Artificial Sequence: Synthetic oligonucleotide
  Target: PCSK9; (+) strand; PAM type: YTN; PAM sequence: CTT
caatgtggagggactcgagg

SEQ ID NO: 26413 - DNA, 20 bp, Artificial Sequence
  Description of Artificial Sequence: Synthetic oligonucleotide
  Target: PCSK9; (+) strand; PAM type: YTN; PAM sequence: TTC
aatgtggagggactcgaggt

SEQ ID NO: 26414 - DNA, 20 bp, Artificial Sequence
  Description of Artificial Sequence: Synthetic oligonucleotide
  Target: PCSK9; (+) strand; PAM type: YTN; PAM sequence: CTC
gaggtgatctaagcaaactt

SEQ ID NO: 26415 - DNA, 20 bp, Artificial Sequence
  Description of Artificial Sequence: Synthetic oligonucleotide
  Target: PCSK9; (+) strand; PAM type: YTN; PAM sequence: CTA
agcaaactttttctatcttc

SEQ ID NO: 26416 - DNA, 20 bp, Artificial Sequence
  Description of Artificial Sequence: Synthetic oligonucleotide
  Target: PCSK9; (+) strand; PAM type: YTN; PAM sequence: CTT
tttctatcttctgcttgcat

SEQ ID NO: 26417 - DNA, 20 bp, Artificial Sequence
  Description of Artificial Sequence: Synthetic oligonucleotide
  Target: PCSK9; (+) strand; PAM type: YTN; PAM sequence: TTT
ttctatcttctgcttgcata

SEQ ID NO: 26418 - DNA, 20 bp, Artificial Sequence
  Description of Artificial Sequence: Synthetic oligonucleotide
  Target: PCSK9; (+) strand; PAM type: YTN; PAM sequence: TTT
tctatcttctgcttgcatac

SEQ ID NO: 26419 - DNA, 20 bp, Artificial Sequence
  Description of Artificial Sequence: Synthetic oligonucleotide
  Target: PCSK9; (+) strand; PAM type: YTN; PAM sequence: TTT
ctatcttctgcttgcatacc

SEQ ID NO: 26420 - DNA, 20 bp, Artificial Sequence
  Description of Artificial Sequence: Synthetic oligonucleotide
  Target: PCSK9; (+) strand; PAM type: YTN; PAM sequence: TTC
tatcttctgcttgcatacct

SEQ ID NO: 26421 - DNA, 20 bp, Artificial Sequence
  Description of Artificial Sequence: Synthetic oligonucleotide
  Target: PCSK9; (+) strand; PAM type: YTN; PAM sequence: CTA
tcttctgcttgcatacctct

SEQ ID NO: 26422 - DNA, 20 bp, Artificial Sequence
  Description of Artificial Sequence: Synthetic oligonucleotide
  Target: PCSK9; (+) strand; PAM type: YTN; PAM sequence: CTT
ctgcttgcatacctctgaga

SEQ ID NO: 26423 - DNA, 20 bp, Artificial Sequence
  Description of Artificial Sequence: Synthetic oligonucleotide
  Target: PCSK9; (+) strand; PAM type: YTN; PAM sequence: TTC
tgcttgcatacctctgagac

SEQ ID NO: 26424 - DNA, 20 bp, Artificial Sequence
  Description of Artificial Sequence: Synthetic oligonucleotide
  Target: PCSK9; (+) strand; PAM type: YTN; PAM sequence: CTG
cttgcatacctctgagacca

SEQ ID NO: 26425 - DNA, 20 bp, Artificial Sequence
  Description of Artificial Sequence: Synthetic oligonucleotide
  Target: PCSK9; (+) strand; PAM type: YTN; PAM sequence: CTT
gcatacctctgagaccaggg

SEQ ID NO: 26426 - DNA, 20 bp, Artificial Sequence
  Description of Artificial Sequence: Synthetic oligonucleotide
  Target: PCSK9; (+) strand; PAM type: YTN; PAM sequence: TTG
catacctctgagaccagggg

SEQ ID NO: 26427 - DNA, 20 bp, Artificial Sequence
  Description of Artificial Sequence: Synthetic oligonucleotide
  Target: PCSK9; (+) strand; PAM type: YTN; PAM sequence: CTC
tgagaccaggggactcactc

SEQ ID NO: 26428 - DNA, 20 bp, Artificial Sequence
  Description of Artificial Sequence: Synthetic oligonucleotide
  Target: PCSK9; (+) strand; PAM type: YTN; PAM sequence: CTG
agaccaggggactcactcac

SEQ ID NO: 26429 - DNA, 20 bp, Artificial Sequence
  Description of Artificial Sequence: Synthetic oligonucleotide
  Target: PCSK9; (+) strand; PAM type: YTN; PAM sequence: CTC
actcacttgcatgactgggc

SEQ ID NO: 26430 - DNA, 20 bp, Artificial Sequence
  Description of Artificial Sequence: Synthetic oligonucleotide
  Target: PCSK9; (+) strand; PAM type: YTN; PAM sequence: CTC
acttgcatgactgggccctg

SEQ ID NO: 26431 - DNA, 20 bp, Artificial Sequence
  Description of Artificial Sequence: Synthetic oligonucleotide
  Target: PCSK9; (+) strand; PAM type: YTN; PAM sequence: CTT
gcatgactgggccctgcagg

SEQ ID NO: 26432 - DNA, 20 bp, Artificial Sequence
  Description of Artificial Sequence: Synthetic oligonucleotide
  Target: PCSK9; (+) strand; PAM type: YTN; PAM sequence: TTG
catgactgggccctgcaggt

SEQ ID NO: 26433 - DNA, 20 bp, Artificial Sequence
  Description of Artificial Sequence: Synthetic oligonucleotide
  Target: PCSK9; (+) strand; PAM type: YTN; PAM sequence: CTG
ggccctgcaggtcacactgg

SEQ ID NO: 26434 - DNA, 20 bp, Artificial Sequence
  Description of Artificial Sequence: Synthetic oligonucleotide
  Target: PCSK9; (+) strand; PAM type: YTN; PAM sequence: CTG
caggtcacactggccaggca

SEQ ID NO: 26435 - DNA, 20 bp, Artificial Sequence
  Description of Artificial Sequence: Synthetic oligonucleotide
  Target: PCSK9; (+) strand; PAM type: YTN; PAM sequence: CTG
gccaggcagatgtggtggag

SEQ ID NO: 26436 - DNA, 20 bp, Artificial Sequence
  Description of Artificial Sequence: Synthetic oligonucleotide
  Target: PCSK9; (+) strand; PAM type: YTN; PAM sequence: CTG
gcagaggactttttctagac

SEQ ID NO: 26437 - DNA, 20 bp, Artificial Sequence
  Description of Artificial Sequence: Synthetic oligonucleotide
  Target: PCSK9; (+) strand; PAM type: YTN; PAM sequence: CTT
tttctagactgtgactacat

SEQ ID NO: 26438 - DNA, 20 bp, Artificial Sequence
  Description of Artificial Sequence: Synthetic oligonucleotide
  Target: PCSK9; (+) strand; PAM type: YTN; PAM sequence: TTT
ttctagactgtgactacatt

SEQ ID NO: 26439 - DNA, 20 bp, Artificial Sequence
  Description of Artificial Sequence: Synthetic oligonucleotide
  Target: PCSK9; (+) strand; PAM type: YTN; PAM sequence: TTT
tctagactgtgactacattt

SEQ ID NO: 26440 - DNA, 20 bp, Artificial Sequence
  Description of Artificial Sequence: Synthetic oligonucleotide
  Target: PCSK9; (+) strand; PAM type: YTN; PAM sequence: TTT
ctagactgtgactacattta

SEQ ID NO: 26441 - DNA, 20 bp, Artificial Sequence
  Description of Artificial Sequence: Synthetic oligonucleotide
  Target: PCSK9; (+) strand; PAM type: YTN; PAM sequence: TTC
tagactgtgactacatttag

SEQ ID NO: 26442 - DNA, 20 bp, Artificial Sequence
  Description of Artificial Sequence: Synthetic oligonucleotide
  Target: PCSK9; (+) strand; PAM type: YTN; PAM sequence: CTA
gactgtgactacatttagtc

SEQ ID NO: 26443 - DNA, 20 bp, Artificial Sequence
  Description of Artificial Sequence: Synthetic oligonucleotide
  Target: PCSK9; (+) strand; PAM type: YTN; PAM sequence: CTG
tgactacatttagtccaccc

SEQ ID NO: 26444 - DNA, 20 bp, Artificial Sequence
  Description of Artificial Sequence: Synthetic oligonucleotide
  Target: PCSK9; (+) strand; PAM type: YTN; PAM sequence: CTA
catttagtccacccagcggc

SEQ ID NO: 26445 - DNA, 20 bp, Artificial Sequence
  Description of Artificial Sequence: Synthetic oligonucleotide
  Target: PCSK9; (+) strand; PAM type: YTN; PAM sequence: TTT
agtccacccagcggcccccc

SEQ ID NO: 26446 - DNA, 20 bp, Artificial Sequence
  Description of Artificial Sequence: Synthetic oligonucleotide
  Target: PCSK9; (+) strand; PAM type: YTN; PAM sequence: TTA
gtccacccagcggcccccct

SEQ ID NO: 26447 - DNA, 20 bp, Artificial Sequence
  Description of Artificial Sequence: Synthetic oligonucleotide
  Target: PCSK9; (+) strand; PAM type: YTN; PAM sequence: CTA
tgaagtccagttgagaacta

SEQ ID NO: 26448 - DNA, 20 bp, Artificial Sequence
  Description of Artificial Sequence: Synthetic oligonucleotide
  Target: PCSK9; (+) strand; PAM type: YTN; PAM sequence: TTG
agaactaggactctgggggc

SEQ ID NO: 26449 - DNA, 20 bp, Artificial Sequence
  Description of Artificial Sequence: Synthetic oligonucleotide
  Target: PCSK9; (+) strand; PAM type: YTN; PAM sequence: CTA
ggactctgggggccggtgga

SEQ ID NO: 26450 - DNA, 20 bp, Artificial Sequence
  Description of Artificial Sequence: Synthetic oligonucleotide
  Target: PCSK9; (+) strand; PAM type: YTN; PAM sequence: CTC
tgggggccggtggacagaga

SEQ ID NO: 26451 - DNA, 20 bp, Artificial Sequence
  Description of Artificial Sequence: Synthetic oligonucleotide
  Target: PCSK9; (+) strand; PAM type: YTN; PAM sequence: CTG
ggggccggtggacagagaag

SEQ ID NO: 26452 - DNA, 20 bp, Artificial Sequence
  Description of Artificial Sequence: Synthetic oligonucleotide
  Target: PCSK9; (+) strand; PAM type: YTN; PAM sequence: TTC
tctcccttactgacttcctt

SEQ ID NO: 26453 - DNA, 20 bp, Artificial Sequence
  Description of Artificial Sequence: Synthetic oligonucleotide
  Target: PCSK9; (+) strand; PAM type: YTN; PAM sequence: CTC
tcccttactgacttccttct

SEQ ID NO: 26454 - DNA, 20 bp, Artificial Sequence
  Description of Artificial Sequence: Synthetic oligonucleotide
  Target: PCSK9; (+) strand; PAM type: YTN; PAM sequence: CTC
ccttactgacttccttctgt

SEQ ID NO: 26455 - DNA, 20 bp, Artificial Sequence
  Description of Artificial Sequence: Synthetic oligonucleotide
  Target: PCSK9; (+) strand; PAM type: YTN; PAM sequence: CTT
actgacttccttctgtggcc

SEQ ID NO: 26456 - DNA, 20 bp, Artificial Sequence
  Description of Artificial Sequence: Synthetic oligonucleotide
  Target: PCSK9; (+) strand; PAM type: YTN; PAM sequence: TTA
ctgacttccttctgtggcca

SEQ ID NO: 26457 - DNA, 20 bp, Artificial Sequence
  Description of Artificial Sequence: Synthetic oligonucleotide
  Target: PCSK9; (+) strand; PAM type: YTN; PAM sequence: CTG
acttccttctgtggccagac

SEQ ID NO: 26458 - DNA, 20 bp, Artificial Sequence
  Description of Artificial Sequence: Synthetic oligonucleotide
  Target: PCSK9; (+) strand; PAM type: YTN; PAM sequence: CTT
ccttctgtggccagacattg

SEQ ID NO: 26459 - DNA, 20 bp, Artificial Sequence
  Description of Artificial Sequence: Synthetic oligonucleotide
  Target: PCSK9; (+) strand; PAM type: YTN; PAM sequence: TTC
cttctgtggccagacattga

SEQ ID NO: 26460 - DNA, 20 bp, Artificial Sequence
  Description of Artificial Sequence: Synthetic oligonucleotide
  Target: PCSK9; (+) strand; PAM type: YTN; PAM sequence: CTT
ctgtggccagacattgagca

SEQ ID NO: 26461 - DNA, 20 bp, Artificial Sequence
  Description of Artificial Sequence: Synthetic oligonucleotide
  Target: PCSK9; (+) strand; PAM type: YTN; PAM sequence: TTC
tgtggccagacattgagcaa

SEQ ID NO: 26462 - DNA, 20 bp, Artificial Sequence
  Description of Artificial Sequence: Synthetic oligonucleotide
  Target: PCSK9; (+) strand; PAM type: YTN; PAM sequence: CTG
tggccagacattgagcaagg

SEQ ID NO: 26463 - DNA, 20 bp, Artificial Sequence
  Description of Artificial Sequence: Synthetic oligonucleotide
  Target: PCSK9; (+) strand; PAM type: YTN; PAM sequence: TTG
agcaaggcctctgtacagca

SEQ ID NO: 26464 - DNA, 20 bp, Artificial Sequence
  Description of Artificial Sequence: Synthetic oligonucleotide
  Target: PCSK9; (+) strand; PAM type: YTN; PAM sequence: CTC
tgtacagcatgtcctggggc

SEQ ID NO: 26465 - DNA, 20 bp, Artificial Sequence
  Description of Artificial Sequence: Synthetic oligonucleotide
  Target: PCSK9; (+) strand; PAM type: YTN; PAM sequence: CTG
tacagcatgtcctggggctg

SEQ ID NO: 26466 - DNA, 20 bp, Artificial Sequence
  Description of Artificial Sequence: Synthetic oligonucleotide
  Target: PCSK9; (+) strand; PAM type: YTN; PAM sequence: CTG
gggctggccttgccgtagct

SEQ ID NO: 26467 - DNA, 20 bp, Artificial Sequence
  Description of Artificial Sequence: Synthetic oligonucleotide
  Target: PCSK9; (+) strand; PAM type: YTN; PAM sequence: CTG
gccttgccgtagctgctaaa

SEQ ID NO: 26468 - DNA, 20 bp, Artificial Sequence
  Description of Artificial Sequence: Synthetic oligonucleotide
  Target: PCSK9; (+) strand; PAM type: YTN; PAM sequence: CTT
gccgtagctgctaaatagtt

SEQ ID NO: 26469 - DNA, 20 bp, Artificial Sequence
  Description of Artificial Sequence: Synthetic oligonucleotide
  Target: PCSK9; (+) strand; PAM type: YTN; PAM sequence: TTG
ccgtagctgctaaatagttg

SEQ ID NO: 26470 - DNA, 20 bp, Artificial Sequence
  Description of Artificial Sequence: Synthetic oligonucleotide
  Target: PCSK9; (+) strand; PAM type: YTN; PAM sequence: CTG
ctaaatagttgacgaaacca

SEQ ID NO: 26471 - DNA, 20 bp, Artificial Sequence
  Description of Artificial Sequence: Synthetic oligonucleotide
  Target: PCSK9; (+) strand; PAM type: YTN; PAM sequence: CTA
aatagttgacgaaaccagtc

SEQ ID NO: 26472 - DNA, 20 bp, Artificial Sequence
  Description of Artificial Sequence: Synthetic oligonucleotide
  Target: PCSK9; (+) strand; PAM type: YTN; PAM sequence: TTG
acgaaaccagtccagagagg

SEQ ID NO: 26473 - DNA, 20 bp, Artificial Sequence
  Description of Artificial Sequence: Synthetic oligonucleotide
  Target: PCSK9; (+) strand; PAM type: YTN; PAM sequence: CTG
ccagggtcgcacagctcaag

SEQ ID NO: 26474 - DNA, 20 bp, Artificial Sequence
  Description of Artificial Sequence: Synthetic oligonucleotide
  Target: PCSK9; (+) strand; PAM type: YTN; PAM sequence: CTC
aagctggggaactcgctggg

SEQ ID NO: 26475 - DNA, 20 bp, Artificial Sequence
  Description of Artificial Sequence: Synthetic oligonucleotide
  Target: PCSK9; (+) strand; PAM type: YTN; PAM sequence: CTG
gggaactcgctgggaaaact

SEQ ID NO: 26476 - DNA, 20 bp, Artificial Sequence
  Description of Artificial Sequence: Synthetic oligonucleotide
  Target: PCSK9; (+) strand; PAM type: YTN; PAM sequence: CTC
gctgggaaaactgtcagctc

SEQ ID NO: 26477 - DNA, 20 bp, Artificial Sequence
  Description of Artificial Sequence: Synthetic oligonucleotide
  Target: PCSK9; (+) strand; PAM type: YTN; PAM sequence: CTG
ggaaaactgtcagctctggg

SEQ ID NO: 26478 - DNA, 20 bp, Artificial Sequence
  Description of Artificial Sequence: Synthetic oligonucleotide
  Target: PCSK9; (+) strand; PAM type: YTN; PAM sequence: CTG
tcagctctgggcagcagctt

SEQ ID NO: 26479 - DNA, 20 bp, Artificial Sequence
  Description of Artificial Sequence: Synthetic oligonucleotide
  Target: PCSK9; (+) strand; PAM type: YTN; PAM sequence: CTC
tgggcagcagcttgacttcc

SEQ ID NO: 26480 - DNA, 20 bp, Artificial Sequence
  Description of Artificial Sequence: Synthetic oligonucleotide
  Target: PCSK9; (+) strand; PAM type: YTN; PAM sequence: CTG
ggcagcagcttgacttccac

SEQ ID NO: 26481 - DNA, 20 bp, Artificial Sequence
  Description of Artificial Sequence: Synthetic oligonucleotide
  Target: PCSK9; (+) strand; PAM type: YTN; PAM sequence: CTT
gacttccactgtaagcccca

SEQ ID NO: 26482 - DNA, 20 bp, Artificial Sequence
  Description of Artificial Sequence: Synthetic oligonucleotide
  Target: PCSK9; (+) strand; PAM type: YTN; PAM sequence: TTG
acttccactgtaagccccag

SEQ ID NO: 26483 - DNA, 20 bp, Artificial Sequence
  Description of Artificial Sequence: Synthetic oligonucleotide
  Target: PCSK9; (+) strand; PAM type: YTN; PAM sequence: CTT
ccactgtaagccccagcccc

SEQ ID NO: 26484 - DNA, 20 bp, Artificial Sequence
  Description of Artificial Sequence: Synthetic oligonucleotide
  Target: PCSK9; (+) strand; PAM type: YTN; PAM sequence: TTC
cactgtaagccccagccccc

SEQ ID NO: 26485 - DNA, 20 bp, Artificial Sequence
  Description of Artificial Sequence: Synthetic oligonucleotide
  Target: PCSK9; (+) strand; PAM type: YTN; PAM sequence: CTG
taagccccagcccccagggt

SEQ ID NO: 26486 - DNA, 20 bp, Artificial Sequence
  Description of Artificial Sequence: Synthetic oligonucleotide
  Target: PCSK9; (+) strand; PAM type: YTN; PAM sequence: CTG
gctctggtgctggcagaggc

SEQ ID NO: 26487 - DNA, 20 bp, Artificial Sequence
  Description of Artificial Sequence: Synthetic oligonucleotide
  Target: PCSK9; (+) strand; PAM type: YTN; PAM sequence: CTC
tggtgctggcagaggcagcc

SEQ ID NO: 26488 - DNA, 20 bp, Artificial Sequence
  Description of Artificial Sequence: Synthetic oligonucleotide
  Target: PCSK9; (+) strand; PAM type: YTN; PAM sequence: CTG
gtgctggcagaggcagccca

SEQ ID NO: 26489 - DNA, 20 bp, Artificial Sequence
  Description of Artificial Sequence: Synthetic oligonucleotide
  Target: PCSK9; (+) strand; PAM type: YTN; PAM sequence: CTG
gcagaggcagcccactagcc

SEQ ID NO: 26490 - DNA, 20 bp, Artificial Sequence
  Description of Artificial Sequence: Synthetic oligonucleotide
  Target: PCSK9; (+) strand; PAM type: YTN; PAM sequence: CTA
gcctgtttcaaaggctgaga

SEQ ID NO: 26491 - DNA, 20 bp, Artificial Sequence
  Description of Artificial Sequence: Synthetic oligonucleotide
  Target: PCSK9; (+) strand; PAM type: YTN; PAM sequence: CTG
tttcaaaggctgagaaggcc

SEQ ID NO: 26492 - DNA, 20 bp, Artificial Sequence
  Description of Artificial Sequence: Synthetic oligonucleotide
  Target: PCSK9; (+) strand; PAM type: YTN; PAM sequence: TTT
caaaggctgagaaggcccag

SEQ ID NO: 26493 - DNA, 20 bp, Artificial Sequence
  Description of Artificial Sequence: Synthetic oligonucleotide
  Target: PCSK9; (+) strand; PAM type: YTN; PAM sequence: TTC
aaaggctgagaaggcccagg

SEQ ID NO: 26494 - DNA, 20 bp, Artificial Sequence
  Description of Artificial Sequence: Synthetic oligonucleotide
  Target: PCSK9; (+) strand; PAM type: YTN; PAM sequence: CTG
agaaggcccaggagtctgcc

SEQ ID NO: 26495 - DNA, 20 bp, Artificial Sequence
  Description of Artificial Sequence: Synthetic oligonucleotide
  Target: PCSK9; (+) strand; PAM type: YTN; PAM sequence: CTG
ccctgtgctccaccagttct

SEQ ID NO: 26496 - DNA, 20 bp, Artificial Sequence
  Description of Artificial Sequence: Synthetic oligonucleotide
  Target: PCSK9; (+) strand; PAM type: YTN; PAM sequence: CTG
tgctccaccagttctgccct

SEQ ID NO: 26497 - DNA, 20 bp, Artificial Sequence
  Description of Artificial Sequence: Synthetic oligonucleotide
  Target: PCSK9; (+) strand; PAM type: YTN; PAM sequence: CTC
caccagttctgccctgagac

SEQ ID NO: 26498 - DNA, 20 bp, Artificial Sequence
  Description of Artificial Sequence: Synthetic oligonucleotide
  Target: PCSK9; (+) strand; PAM type: YTN; PAM sequence: TTC
tgccctgagactttcctaca

SEQ ID NO: 26499 - DNA, 20 bp, Artificial Sequence
  Description of Artificial Sequence: Synthetic oligonucleotide
  Target: PCSK9; (+) strand; PAM type: YTN; PAM sequence: CTG
ccctgagactttcctacaga

SEQ ID NO: 26500 - DNA, 20 bp, Artificial Sequence
  Description of Artificial Sequence: Synthetic oligonucleotide
  Target: PCSK9; (+) strand; PAM type: YTN; PAM sequence: CTG
agactttcctacagagtaca

SEQ ID NO: 26501 - DNA, 20 bp, Artificial Sequence
  Description of Artificial Sequence: Synthetic oligonucleotide
  Target: PCSK9; (+) strand; PAM type: YTN; PAM sequence: CTT
tcctacagagtacaggtttt

SEQ ID NO: 26502 - DNA, 20 bp, Artificial Sequence
  Description of Artificial Sequence: Synthetic oligonucleotide
  Target: PCSK9; (+) strand; PAM type: YTN; PAM sequence: TTT
cctacagagtacaggttttg

SEQ ID NO: 26503 - DNA, 20 bp, Artificial Sequence
  Description of Artificial Sequence: Synthetic oligonucleotide
  Target: PCSK9; (+) strand; PAM type: YTN; PAM sequence: TTC
ctacagagtacaggttttga

SEQ ID NO: 26504 - DNA, 20 bp, Artificial Sequence
  Description of Artificial Sequence: Synthetic oligonucleotide
  Target: PCSK9; (+) strand; PAM type: YTN; PAM sequence: CTA
cagagtacaggttttgatgt

SEQ ID NO: 26505 - DNA, 20 bp, Artificial Sequence
  Description of Artificial Sequence: Synthetic oligonucleotide
  Target: PCSK9; (+) strand; PAM type: YTN; PAM sequence: TTT
tgatgttcagttttaaaggc

SEQ ID NO: 26506 - DNA, 20 bp, Artificial Sequence
  Description of Artificial Sequence: Synthetic oligonucleotide
  Target: PCSK9; (+) strand; PAM type: YTN; PAM sequence: TTT
gatgttcagttttaaaggca

SEQ ID NO: 26507 - DNA, 20 bp, Artificial Sequence
  Description of Artificial Sequence: Synthetic oligonucleotide
  Target: PCSK9; (+) strand; PAM type: YTN; PAM sequence: TTG
atgttcagttttaaaggcaa

SEQ ID NO: 26508 - DNA, 20 bp, Artificial Sequence
  Description of Artificial Sequence: Synthetic oligonucleotide
  Target: PCSK9; (+) strand; PAM type: YTN; PAM sequence: TTC
agttttaaaggcaagaatca

SEQ ID NO: 26509 - DNA, 20 bp, Artificial Sequence
  Description of Artificial Sequence: Synthetic oligonucleotide
  Target: PCSK9; (+) strand; PAM type: YTN; PAM sequence: TTT
taaaggcaagaatcaataac

SEQ ID NO: 26510 - DNA, 20 bp, Artificial Sequence
  Description of Artificial Sequence: Synthetic oligonucleotide
  Target: PCSK9; (+) strand; PAM type: YTN; PAM sequence: TTT
aaaggcaagaatcaataacc

SEQ ID NO: 26511 - DNA, 20 bp, Artificial Sequence
  Description of Artificial Sequence: Synthetic oligonucleotide
  Target: PCSK9; (+) strand; PAM type: YTN; PAM sequence: TTA
aaggcaagaatcaataacct

SEQ ID NO: 26512 - DNA, 20 bp, Artificial Sequence
  Description of Artificial Sequence: Synthetic oligonucleotide
  Target: PCSK9; (+) strand; PAM type: YTN; PAM sequence: CTT
ctgccccatcaggtgacccc

SEQ ID NO: 26513 - DNA, 20 bp, Artificial Sequence
  Description of Artificial Sequence: Synthetic oligonucleotide
  Target: PCSK9; (+) strand; PAM type: YTN; PAM sequence: TTC
tgccccatcaggtgacccct

SEQ ID NO: 26514 - DNA, 20 bp, Artificial Sequence
  Description of Artificial Sequence: Synthetic oligonucleotide
  Target: PCSK9; (+) strand; PAM type: YTN; PAM sequence: CTG
ccccatcaggtgaccccttg

SEQ ID NO: 26515 - DNA, 20 bp, Artificial Sequence
  Description of Artificial Sequence: Synthetic oligonucleotide
  Target: PCSK9; (+) strand; PAM type: YTN; PAM sequence: CTT
gtgcctgtcccaccccttta

SEQ ID NO: 26516 - DNA, 20 bp, Artificial Sequence
  Description of Artificial Sequence: Synthetic oligonucleotide
  Target: PCSK9; (+) strand; PAM type: YTN; PAM sequence: TTG
tgcctgtcccacccctttat

SEQ ID NO: 26517 - DNA, 20 bp, Artificial Sequence
  Description of Artificial Sequence: Synthetic oligonucleotide
  Target: PCSK9; (+) strand; PAM type: YTN; PAM sequence: CTG
tcccacccctttattgactg

SEQ ID NO: 26518 - DNA, 20 bp, Artificial Sequence
  Description of Artificial Sequence: Synthetic oligonucleotide
  Target: PCSK9; (+) strand; PAM type: YTN; PAM sequence: CTT
tattgactgacctcggctca

SEQ ID NO: 26519 - DNA, 20 bp, Artificial Sequence
  Description of Artificial Sequence: Synthetic oligonucleotide
  Target: PCSK9; (+) strand; PAM type: YTN; PAM sequence: TTT
attgactgacctcggctcag

SEQ ID NO: 26520 - DNA, 20 bp, Artificial Sequence
  Description of Artificial Sequence: Synthetic oligonucleotide
  Target: PCSK9; (+) strand; PAM type: YTN; PAM sequence: TTA
ttgactgacctcggctcagt

SEQ ID NO: 26521 - DNA, 20 bp, Artificial Sequence
  Description of Artificial Sequence: Synthetic oligonucleotide
  Target: PCSK9; (+) strand; PAM type: YTN; PAM sequence: TTG
actgacctcggctcagtcag

SEQ ID NO: 26522 - DNA, 20 bp, Artificial Sequence
  Description of Artificial Sequence: Synthetic oligonucleotide
  Target: PCSK9; (+) strand; PAM type: YTN; PAM sequence: CTG
acctcggctcagtcaggtca

SEQ ID NO: 26523 - DNA, 20 bp, Artificial Sequence
  Description of Artificial Sequence: Synthetic oligonucleotide
  Target: PCSK9; (+) strand; PAM type: YTN; PAM sequence: CTC
ggctcagtcaggtcagttcc

SEQ ID NO: 26524 - DNA, 20 bp, Artificial Sequence
  Description of Artificial Sequence: Synthetic oligonucleotide
  Target: PCSK9; (+) strand; PAM type: YTN; PAM sequence: CTC
agtcaggtcagttcctgaag

SEQ ID NO: 26525 - DNA, 20 bp, Artificial Sequence
  Description of Artificial Sequence: Synthetic oligonucleotide
  Target: PCSK9; (+) strand; PAM type: YTN; PAM sequence: TTC
ctgaaggtcagtgtgtggag

SEQ ID NO: 26526 - DNA, 20 bp, Artificial Sequence
  Description of Artificial Sequence: Synthetic oligonucleotide
  Target: PCSK9; (+) strand; PAM type: YTN; PAM sequence: CTG
aaggtcagtgtgtggagggg

SEQ ID NO: 26527 - DNA, 20 bp, Artificial Sequence
  Description of Artificial Sequence: Synthetic oligonucleotide
  Target: PCSK9; (+) strand; PAM type: YTN; PAM sequence: CTG
ttctttcccagaaaggcctt

SEQ ID NO: 26528 - DNA, 20 bp, Artificial Sequence
  Description of Artificial Sequence: Synthetic oligonucleotide
  Target: PCSK9; (+) strand; PAM type: YTN; PAM sequence: TTC
tttcccagaaaggccttccc

SEQ ID NO: 26529 - DNA, 20 bp, Artificial Sequence
  Description of Artificial Sequence: Synthetic oligonucleotide
  Target: PCSK9; (+) strand; PAM type: YTN; PAM sequence: CTT
tcccagaaaggccttcccca

SEQ ID NO: 26530 - DNA, 20 bp, Artificial Sequence
  Description of Artificial Sequence: Synthetic oligonucleotide
  Target: PCSK9; (+) strand; PAM type: YTN; PAM sequence: TTT
cccagaaaggccttccccag

SEQ ID NO: 26531 - DNA, 20 bp, Artificial Sequence
  Description of Artificial Sequence: Synthetic oligonucleotide
  Target: PCSK9; (+) strand; PAM type: YTN; PAM sequence: TTC
ccagaaaggccttccccagg

SEQ ID NO: 26532 - DNA, 20 bp, Artificial Sequence
  Description of Artificial Sequence: Synthetic oligonucleotide
  Target: PCSK9; (+) strand; PAM type: YTN; PAM sequence: CTT
ccccaggcctggtgctctgg

SEQ ID NO: 26533 - DNA, 20 bp, Artificial Sequence
  Description of Artificial Sequence: Synthetic oligonucleotide
  Target: PCSK9; (+) strand; PAM type: YTN; PAM sequence: TTC
cccaggcctggtgctctggc

SEQ ID NO: 26534 - DNA, 20 bp, Artificial Sequence
  Description of Artificial Sequence: Synthetic oligonucleotide
  Target: PCSK9; (+) strand; PAM type: YTN; PAM sequence: CTG
gtgctctggcctctggagga

SEQ ID NO: 26535 - DNA, 20 bp, Artificial Sequence
  Description of Artificial Sequence: Synthetic oligonucleotide
  Target: PCSK9; (+) strand; PAM type: YTN; PAM sequence: CTC
tggcctctggaggacttcct

SEQ ID NO: 26536 - DNA, 20 bp, Artificial Sequence
  Description of Artificial Sequence: Synthetic oligonucleotide
  Target: PCSK9; (+) strand; PAM type: YTN; PAM sequence: CTG
gcctctggaggacttcctgg

SEQ ID NO: 26537 - DNA, 20 bp, Artificial Sequence
  Description of Artificial Sequence: Synthetic oligonucleotide
  Target: PCSK9; (+) strand; PAM type: YTN; PAM sequence: CTC
tggaggacttcctggagaag

SEQ ID NO: 26538 - DNA, 20 bp, Artificial Sequence
  Description of Artificial Sequence: Synthetic oligonucleotide
  Target: PCSK9; (+) strand; PAM type: YTN; PAM sequence: CTG
gaggacttcctggagaagtc

SEQ ID NO: 26539 - DNA, 20 bp, Artificial Sequence
  Description of Artificial Sequence: Synthetic oligonucleotide
  Target: PCSK9; (+) strand; PAM type: YTN; PAM sequence: CTT
cctggagaagtcccttcttt

SEQ ID NO: 26540 - DNA, 20 bp, Artificial Sequence
  Description of Artificial Sequence: Synthetic oligonucleotide
  Target: PCSK9; (+) strand; PAM type: YTN; PAM sequence: TTC
ctggagaagtcccttctttg

SEQ ID NO: 26541 - DNA, 20 bp, Artificial Sequence
  Description of Artificial Sequence: Synthetic oligonucleotide
  Target: PCSK9; (+) strand; PAM type: YTN; PAM sequence: CTG
gagaagtcccttctttgggg

SEQ ID NO: 26542 - DNA, 20 bp, Artificial Sequence
  Description of Artificial Sequence: Synthetic oligonucleotide
  Target: PCSK9; (+) strand; PAM type: YTN; PAM sequence: CTT
ctttggggtcccagtcagtg

SEQ ID NO: 26543 - DNA, 20 bp, Artificial Sequence
  Description of Artificial Sequence: Synthetic oligonucleotide
  Target: PCSK9; (+) strand; PAM type: YTN; PAM sequence: TTC
tttggggtcccagtcagtgt

SEQ ID NO: 26544 - DNA, 20 bp, Artificial Sequence
  Description of Artificial Sequence: Synthetic oligonucleotide
  Target: PCSK9; (+) strand; PAM type: YTN; PAM sequence: CTT
tggggtcccagtcagtgtat

SEQ ID NO: 26545 - DNA, 20 bp, Artificial Sequence
  Description of Artificial Sequence: Synthetic oligonucleotide
  Target: PCSK9; (+) strand; PAM type: YTN; PAM sequence: TTT
ggggtcccagtcagtgtatg

SEQ ID NO: 26546 - DNA, 20 bp, Artificial Sequence
  Description of Artificial Sequence: Synthetic oligonucleotide
  Target: PCSK9; (+) strand; PAM type: YTN; PAM sequence: TTG
gggtcccagtcagtgtatgg

SEQ ID NO: 26547 - DNA, 20 bp, Artificial Sequence
  Description of Artificial Sequence: Synthetic oligonucleotide
  Target: PCSK9; (+) strand; PAM type: YTN; PAM sequence: CTT
attgcatgacctggcacggg

SEQ ID NO: 26548 - DNA, 20 bp, Artificial Sequence
  Description of Artificial Sequence: Synthetic oligonucleotide
  Target: PCSK9; (+) strand; PAM type: YTN; PAM sequence: TTA
ttgcatgacctggcacgggg

SEQ ID NO: 26549 - DNA, 20 bp, Artificial Sequence
  Description of Artificial Sequence: Synthetic oligonucleotide
  Target: PCSK9; (+) strand; PAM type: YTN; PAM sequence: TTG
catgacctggcacggggcag

SEQ ID NO: 26550 - DNA, 20 bp, Artificial Sequence
  Description of Artificial Sequence: Synthetic oligonucleotide
  Target: PCSK9; (+) strand; PAM type: YTN; PAM sequence: CTG
gcacggggcaggggctcaac

SEQ ID NO: 26551 - DNA, 20 bp, Artificial Sequence
  Description of Artificial Sequence: Synthetic oligonucleotide
  Target: PCSK9; (+) strand; PAM type: YTN; PAM sequence: CTC
aacagtcactattgccttcc

SEQ ID NO: 26552 - DNA, 20 bp, Artificial Sequence
  Description of Artificial Sequence: Synthetic oligonucleotide
  Target: PCSK9; (+) strand; PAM type: YTN; PAM sequence: CTA
ttgccttccttgccactgcc

SEQ ID NO: 26553 - DNA, 20 bp, Artificial Sequence
  Description of Artificial Sequence: Synthetic oligonucleotide
  Target: PCSK9; (+) strand; PAM type: YTN; PAM sequence: TTG
ccttccttgccactgccatt

SEQ ID NO: 26554 - DNA, 20 bp, Artificial Sequence
  Description of Artificial Sequence: Synthetic oligonucleotide
  Target: PCSK9; (+) strand; PAM type: YTN; PAM sequence: CTT
ccttgccactgccatttcct

SEQ ID NO: 26555 - DNA, 20 bp, Artificial Sequence
  Description of Artificial Sequence: Synthetic oligonucleotide
  Target: PCSK9; (+) strand; PAM type: YTN; PAM sequence: TTC
cttgccactgccatttcctc

SEQ ID NO: 26556 - DNA, 20 bp, Artificial Sequence
  Description of Artificial Sequence: Synthetic oligonucleotide
  Target: PCSK9; (+) strand; PAM type: YTN; PAM sequence: CTT
gccactgccatttcctcctc

SEQ ID NO: 26557 - DNA, 20 bp, Artificial Sequence
  Description of Artificial Sequence: Synthetic oligonucleotide
  Target: PCSK9; (+) strand; PAM type: YTN; PAM sequence: TTG
ccactgccatttcctcctct

SEQ ID NO: 26558 - DNA, 20 bp, Artificial Sequence
  Description of Artificial Sequence: Synthetic oligonucleotide
  Target: PCSK9; (+) strand; PAM type: YTN; PAM sequence: CTG
ccatttcctcctctgtaagc

SEQ ID NO: 26559 - DNA, 20 bp, Artificial Sequence
  Description of Artificial Sequence: Synthetic oligonucleotide
  Target: PCSK9; (+) strand; PAM type: YTN; PAM sequence: TTT
cctcctctgtaagcaggtga

SEQ ID NO: 26560 - DNA, 20 bp, Artificial Sequence
  Description of Artificial Sequence: Synthetic oligonucleotide
  Target: PCSK9; (+) strand; PAM type: YTN; PAM sequence: TTC
ctcctctgtaagcaggtgat

SEQ ID NO: 26561 - DNA, 20 bp, Artificial Sequence
  Description of Artificial Sequence: Synthetic oligonucleotide
  Target: PCSK9; (+) strand; PAM type: YTN; PAM sequence: CTC
ctctgtaagcaggtgattgt

SEQ ID NO: 26562 - DNA, 20 bp, Artificial Sequence
  Description of Artificial Sequence: Synthetic oligonucleotide
  Target: PCSK9; (+) strand; PAM type: YTN; PAM sequence: CTC
tgtaagcaggtgattgtgtg

SEQ ID NO: 26563 - DNA, 20 bp, Artificial Sequence
  Description of Artificial Sequence: Synthetic oligonucleotide
  Target: PCSK9; (+) strand; PAM type: YTN; PAM sequence: CTG
taagcaggtgattgtgtgtc

SEQ ID NO: 26564 - DNA, 20 bp, Artificial Sequence
  Description of Artificial Sequence: Synthetic oligonucleotide
  Target: PCSK9; (+) strand; PAM type: YTN; PAM sequence: TTG
tgtgtccagtctgagcacag

SEQ ID NO: 26565 - DNA, 20 bp, Artificial Sequence
  Description of Artificial Sequence: Synthetic oligonucleotide
  Target: PCSK9; (+) strand; PAM type: YTN; PAM sequence: CTG
agcacagagataagcacaca

SEQ ID NO: 26566 - DNA, 20 bp, Artificial Sequence
  Description of Artificial Sequence: Synthetic oligonucleotide
  Target: PCSK9; (+) strand; PAM type: YTN; PAM sequence: CTT
aataactagcagctgtaggc

SEQ ID NO: 26567 - DNA, 20 bp, Artificial Sequence
  Description of Artificial Sequence: Synthetic oligonucleotide
  Target: PCSK9; (+) strand; PAM type: YTN; PAM sequence: TTA
ataactagcagctgtaggct

SEQ ID NO: 26568 - DNA, 20 bp, Artificial Sequence
  Description of Artificial Sequence: Synthetic oligonucleotide
  Target: PCSK9; (+) strand; PAM type: YTN; PAM sequence: CTA
gcagctgtaggctgggcgcg

SEQ ID NO: 26569 - DNA, 20 bp, Artificial Sequence
  Description of Artificial Sequence: Synthetic oligonucleotide
  Target: PCSK9; (+) strand; PAM type: YTN; PAM sequence: CTG
taggctgggcgcggtggctc

SEQ ID NO: 26570 - DNA, 20 bp, Artificial Sequence
  Description of Artificial Sequence: Synthetic oligonucleotide
  Target: PCSK9; (+) strand; PAM type: YTN; PAM sequence: CTG
ggcgcggtggctcatgcctg

SEQ ID NO: 26571 - DNA, 20 bp, Artificial Sequence
  Description of Artificial Sequence: Synthetic oligonucleotide
  Target: PCSK9; (+) strand; PAM type: YTN; PAM sequence: CTC
atgcctgtaatcccagcact

SEQ ID NO: 26572 - DNA, 20 bp, Artificial Sequence
  Description of Artificial Sequence: Synthetic oligonucleotide
  Target: PCSK9; (+) strand; PAM type: YTN; PAM sequence: CTG
taatcccagcactttgggag

SEQ ID NO: 26573 - DNA, 20 bp, Artificial Sequence
  Description of Artificial Sequence: Synthetic oligonucleotide
  Target: PCSK9; (+) strand; PAM type: YTN; PAM sequence: CTT
tgggaggccgaggtgggcag

SEQ ID NO: 26574 - DNA, 20 bp, Artificial Sequence
  Description of Artificial Sequence: Synthetic oligonucleotide
  Target: PCSK9; (+) strand; PAM type: YTN; PAM sequence: TTT
gggaggccgaggtgggcaga

SEQ ID NO: 26575 - DNA, 20 bp, Artificial Sequence
  Description of Artificial Sequence: Synthetic oligonucleotide
  Target: PCSK9; (+) strand; PAM type: YTN; PAM sequence: TTG
ggaggccgaggtgggcagat

SEQ ID NO: 26576 - DNA, 20 bp, Artificial Sequence
  Description of Artificial Sequence: Synthetic oligonucleotide
  Target: PCSK9; (+) strand; PAM type: YTN; PAM sequence: CTG
aggtcaggagttcgagacca

SEQ ID NO: 26577 - DNA, 20 bp, Artificial Sequence
  Description of Artificial Sequence: Synthetic oligonucleotide
  Target: PCSK9; (+) strand; PAM type: YTN; PAM sequence: TTC
gagaccagcctgttcaacat

SEQ ID NO: 26578 - DNA, 20 bp, Artificial Sequence
  Description of Artificial Sequence: Synthetic oligonucleotide
  Target: PCSK9; (+) strand; PAM type: YTN; PAM sequence: CTG
ttcaacatggtgaaaccccg

SEQ ID NO: 26579 - DNA, 20 bp, Artificial Sequence
  Description of Artificial Sequence: Synthetic oligonucleotide
  Target: PCSK9; (+) strand; PAM type: YTN; PAM sequence: TTC
aacatggtgaaaccccgtct

SEQ ID NO: 26580 - DNA, 20 bp, Artificial Sequence
  Description of Artificial Sequence: Synthetic oligonucleotide
  Target: PCSK9; (+) strand; PAM type: YTN; PAM sequence: CTC
tactaaaaatacaaaaatta

SEQ ID NO: 26581 - DNA, 20 bp, Artificial Sequence
  Description of Artificial Sequence: Synthetic oligonucleotide
  Target: PCSK9; (+) strand; PAM type: YTN; PAM sequence: CTA
ctaaaaatacaaaaattagc

SEQ ID NO: 26582 - DNA, 20 bp, Artificial Sequence
  Description of Artificial Sequence: Synthetic oligonucleotide
  Target: PCSK9; (+) strand; PAM type: YTN; PAM sequence: CTA
aaaatacaaaaattagccag

SEQ ID NO: 26583 - DNA, 20 bp, Artificial Sequence
  Description of Artificial Sequence: Synthetic oligonucleotide
  Target: PCSK9; (+) strand; PAM type: YTN; PAM sequence: TTA
gccaggcatggtggtgggtg

SEQ ID NO: 26584 - DNA, 20 bp, Artificial Sequence
  Description of Artificial Sequence: Synthetic oligonucleotide
  Target: PCSK9; (+) strand; PAM type: YTN; PAM sequence: CTG
tatcccagctacttgggagg

SEQ ID NO: 26585 - DNA, 20 bp, Artificial Sequence
  Description of Artificial Sequence: Synthetic oligonucleotide
  Target: PCSK9; (+) strand; PAM type: YTN; PAM sequence: CTA
cttgggaggctaaggcagga

SEQ ID NO: 26586 - DNA, 20 bp, Artificial Sequence
  Description of Artificial Sequence: Synthetic oligonucleotide
  Target: PCSK9; (+) strand; PAM type: YTN; PAM sequence: CTT
gggaggctaaggcaggagaa

SEQ ID NO: 26587 - DNA, 20 bp, Artificial Sequence
  Description of Artificial Sequence: Synthetic oligonucleotide
  Target: PCSK9; (+) strand; PAM type: YTN; PAM sequence: TTG
ggaggctaaggcaggagaat

SEQ ID NO: 26588 - DNA, 20 bp, Artificial Sequence
  Description of Artificial Sequence: Synthetic oligonucleotide
  Target: PCSK9; (+) strand; PAM type: YTN; PAM sequence: CTA
aggcaggagaatcgcttgaa

SEQ ID NO: 26589 - DNA, 20 bp, Artificial Sequence
  Description of Artificial Sequence: Synthetic oligonucleotide
  Target: PCSK9; (+) strand; PAM type: YTN; PAM sequence: CTT
gaacccaggaggtggaggtt

SEQ ID NO: 26590 - DNA, 20 bp, Artificial Sequence
  Description of Artificial Sequence: Synthetic oligonucleotide
  Target: PCSK9; (+) strand; PAM type: YTN; PAM sequence: TTG
aacccaggaggtggaggttg

SEQ ID NO: 26591 - DNA, 20 bp, Artificial Sequence
  Description of Artificial Sequence: Synthetic oligonucleotide
  Target: PCSK9; (+) strand; PAM type: YTN; PAM sequence: TTG
cagtgagctgagatcgtgcc

SEQ ID NO: 26592 - DNA, 20 bp, Artificial Sequence
  Description of Artificial Sequence: Synthetic oligonucleotide
  Target: PCSK9; (+) strand; PAM type: YTN; PAM sequence: CTG
agatcgtgccactgcaatcc

SEQ ID NO: 26593 - DNA, 20 bp, Artificial Sequence
  Description of Artificial Sequence: Synthetic oligonucleotide
  Target: PCSK9; (+) strand; PAM type: YTN; PAM sequence: CTG
caatccagcctgagtgatag

SEQ ID NO: 26594 - DNA, 20 bp, Artificial Sequence
  Description of Artificial Sequence: Synthetic oligonucleotide
  Target: PCSK9; (+) strand; PAM type: YTN; PAM sequence: CTG
agtgatagagcgagattcca

SEQ ID NO: 26595 - DNA, 20 bp, Artificial Sequence
  Description of Artificial Sequence: Synthetic oligonucleotide
  Target: PCSK9; (+) strand; PAM type: YTN; PAM sequence: TTC
catctcaaaaataaataagt

SEQ ID NO: 26596 - DNA, 20 bp, Artificial Sequence
  Description of Artificial Sequence: Synthetic oligonucleotide
  Target: PCSK9; (+) strand; PAM type: YTN; PAM sequence: CTC
aaaaataaataagtaaataa

SEQ ID NO: 26597 - DNA, 20 bp, Artificial Sequence
  Description of Artificial Sequence: Synthetic oligonucleotide
  Target: PCSK9; (+) strand; PAM type: YTN; PAM sequence: CTA
gcagctgtaaatgtggctgt

SEQ ID NO: 26598 - DNA, 20 bp, Artificial Sequence
  Description of Artificial Sequence: Synthetic oligonucleotide
  Target: PCSK9; (+) strand; PAM type: YTN; PAM sequence: CTG
taaatgtggctgttgttctt

SEQ ID NO: 26599 - DNA, 20 bp, Artificial Sequence
  Description of Artificial Sequence: Synthetic oligonucleotide
  Target: PCSK9; (+) strand; PAM type: YTN; PAM sequence: CTG
ttgttcttcacctccacact

SEQ ID NO: 26600 - DNA, 20 bp, Artificial Sequence
  Description of Artificial Sequence: Synthetic oligonucleotide
  Target: PCSK9; (+) strand; PAM type: YTN; PAM sequence: TTG
ttcttcacctccacactcag

SEQ ID NO: 26601 - DNA, 20 bp, Artificial Sequence
  Description of Artificial Sequence: Synthetic oligonucleotide
  Target: PCSK9; (+) strand; PAM type: YTN; PAM sequence: TTC
ttcacctccacactcagtgc

SEQ ID NO: 26602 - DNA, 20 bp, Artificial Sequence
  Description of Artificial Sequence: Synthetic oligonucleotide
  Target: PCSK9; (+) strand; PAM type: YTN; PAM sequence: CTT
cacctccacactcagtgcca

SEQ ID NO: 26603 - DNA, 20 bp, Artificial Sequence
  Description of Artificial Sequence: Synthetic oligonucleotide
  Target: PCSK9; (+) strand; PAM type: YTN; PAM sequence: TTC
acctccacactcagtgccac

SEQ ID NO: 26604 - DNA, 20 bp, Artificial Sequence
  Description of Artificial Sequence: Synthetic oligonucleotide
  Target: PCSK9; (+) strand; PAM type: YTN; PAM sequence: CTC
cacactcagtgccactccac

SEQ ID NO: 26605 - DNA, 20 bp, Artificial Sequence
  Description of Artificial Sequence: Synthetic oligonucleotide
  Target: PCSK9; (+) strand; PAM type: YTN; PAM sequence: CTC
agtgccactccactccctcc

SEQ ID NO: 26606 - DNA, 20 bp, Artificial Sequence
  Description of Artificial Sequence: Synthetic oligonucleotide
  Target: PCSK9; (+) strand; PAM type: YTN; PAM sequence: CTC
cactccctccctccgtggtg

SEQ ID NO: 26607 - DNA, 20 bp, Artificial Sequence
  Description of Artificial Sequence: Synthetic oligonucleotide
  Target: PCSK9; (+) strand; PAM type: YTN; PAM sequence: CTC
cctccctccgtggtgtgagg

SEQ ID NO: 26608 - DNA, 20 bp, Artificial Sequence
  Description of Artificial Sequence: Synthetic oligonucleotide
  Target: PCSK9; (+) strand; PAM type: YTN; PAM sequence: CTC
cctccgtggtgtgaggggcc

SEQ ID NO: 26609 - DNA, 20 bp, Artificial Sequence
  Description of Artificial Sequence: Synthetic oligonucleotide
  Target: PCSK9; (+) strand; PAM type: YTN; PAM sequence: CTC
cgtggtgtgaggggcctcac

SEQ ID NO: 26610 - DNA, 20 bp, Artificial Sequence
  Description of Artificial Sequence: Synthetic oligonucleotide
  Target: PCSK9; (+) strand; PAM type: YTN; PAM sequence: CTC
actagctgtctcctaggagg

SEQ ID NO: 26611 - DNA, 20 bp, Artificial Sequence
  Description of Artificial Sequence: Synthetic oligonucleotide
  Target: PCSK9; (+) strand; PAM type: YTN; PAM sequence: CTA
gctgtctcctaggaggagca

SEQ ID NO: 26612 - DNA, 20 bp, Artificial Sequence
  Description of Artificial Sequence: Synthetic oligonucleotide
  Target: PCSK9; (+) strand; PAM type: YTN; PAM sequence: CTG
tctcctaggaggagcatggc

SEQ ID NO: 26613 - DNA, 20 bp, Artificial Sequence
  Description of Artificial Sequence: Synthetic oligonucleotide
  Target: PCSK9; (+) strand; PAM type: YTN; PAM sequence: CTC
ctaggaggagcatggctgtg

SEQ ID NO: 26614 - DNA, 20 bp, Artificial Sequence
  Description of Artificial Sequence: Synthetic oligonucleotide
  Target: PCSK9; (+) strand; PAM type: YTN; PAM sequence: CTA
ggaggagcatggctgtgaga

SEQ ID NO: 26615 - DNA, 20 bp, Artificial Sequence
  Description of Artificial Sequence: Synthetic oligonucleotide
  Target: PCSK9; (+) strand; PAM type: YTN; PAM sequence: CTG
tgagattccagctccatcct

SEQ ID NO: 26616 - DNA, 20 bp, Artificial Sequence
  Description of Artificial Sequence: Synthetic oligonucleotide
  Target: PCSK9; (+) strand; PAM type: YTN; PAM sequence: TTC
cagctccatccttggccacg

SEQ ID NO: 26617 - DNA, 20 bp, Artificial Sequence
  Description of Artificial Sequence: Synthetic oligonucleotide
  Target: PCSK9; (+) strand; PAM type: YTN; PAM sequence: CTC
catccttggccacggctcct

SEQ ID NO: 26618 - DNA, 20 bp, Artificial Sequence
  Description of Artificial Sequence: Synthetic oligonucleotide
  Target: PCSK9; (+) strand; PAM type: YTN; PAM sequence: CTT
ggccacggctcctggagaca

SEQ ID NO: 26619 - DNA, 20 bp, Artificial Sequence
  Description of Artificial Sequence: Synthetic oligonucleotide
  Target: PCSK9; (+) strand; PAM type: YTN; PAM sequence: TTG
gccacggctcctggagacat

SEQ ID NO: 26620 - DNA, 20 bp, Artificial Sequence
  Description of Artificial Sequence: Synthetic oligonucleotide
  Target: PCSK9; (+) strand; PAM type: YTN; PAM sequence: CTC
ctggagacatcttagaggcc

SEQ ID NO: 26621 - DNA, 20 bp, Artificial Sequence
  Description of Artificial Sequence: Synthetic oligonucleotide
  Target: PCSK9; (+) strand; PAM type: YTN; PAM sequence: CTG
gagacatcttagaggccagg

SEQ ID NO: 26622 - DNA, 20 bp, Artificial Sequence
  Description of Artificial Sequence: Synthetic oligonucleotide
  Target: PCSK9; (+) strand; PAM type: YTN; PAM sequence: CTT
agaggccaggatccagaagg

SEQ ID NO: 26623 - DNA, 20 bp, Artificial Sequence
  Description of Artificial Sequence: Synthetic oligonucleotide
  Target: PCSK9; (+) strand; PAM type: YTN; PAM sequence: TTA
gaggccaggatccagaaggc

SEQ ID NO: 26624 - DNA, 20 bp, Artificial Sequence
  Description of Artificial Sequence: Synthetic oligonucleotide
  Target: PCSK9; (+) strand; PAM type: YTN; PAM sequence: CTC
ccacacctcatttgacaggg

SEQ ID NO: 26625 - DNA, 20 bp, Artificial Sequence
  Description of Artificial Sequence: Synthetic oligonucleotide
  Target: PCSK9; (+) strand; PAM type: YTN; PAM sequence: CTC
atttgacaggggagaagctg

SEQ ID NO: 26626 - DNA, 20 bp, Artificial Sequence
  Description of Artificial Sequence: Synthetic oligonucleotide
  Target: PCSK9; (+) strand; PAM type: YTN; PAM sequence: TTT
gacaggggagaagctgtcag

SEQ ID NO: 26627 - DNA, 20 bp, Artificial Sequence
  Description of Artificial Sequence: Synthetic oligonucleotide
  Target: PCSK9; (+) strand; PAM type: YTN; PAM sequence: TTG
acaggggagaagctgtcagt

SEQ ID NO: 26628 - DNA, 20 bp, Artificial Sequence
  Description of Artificial Sequence: Synthetic oligonucleotide
  Target: PCSK9; (+) strand; PAM type: YTN; PAM sequence: CTG
tcagttccaggtccccttgc

SEQ ID NO: 26629 - DNA, 20 bp, Artificial Sequence
  Description of Artificial Sequence: Synthetic oligonucleotide
  Target: PCSK9; (+) strand; PAM type: YTN; PAM sequence: TTC
caggtccccttgcacatcag

SEQ ID NO: 26630 - DNA, 20 bp, Artificial Sequence
  Description of Artificial Sequence: Synthetic oligonucleotide
  Target: PCSK9; (+) strand; PAM type: YTN; PAM sequence: CTT
gcacatcagggccagagctg

SEQ ID NO: 26631 - DNA, 20 bp, Artificial Sequence
  Description of Artificial Sequence: Synthetic oligonucleotide
  Target: PCSK9; (+) strand; PAM type: YTN; PAM sequence: TTG
cacatcagggccagagctgc

SEQ ID NO: 26632 - DNA, 20 bp, Artificial Sequence
  Description of Artificial Sequence: Synthetic oligonucleotide
  Target: PCSK9; (+) strand; PAM type: YTN; PAM sequence: CTG
cgttaggcctccagtctcca

SEQ ID NO: 26633 - DNA, 20 bp, Artificial Sequence
  Description of Artificial Sequence: Synthetic oligonucleotide
  Target: PCSK9; (+) strand; PAM type: YTN; PAM sequence: TTA
ggcctccagtctccaggcca

SEQ ID NO: 26634 - DNA, 20 bp, Artificial Sequence
  Description of Artificial Sequence: Synthetic oligonucleotide
  Target: PCSK9; (+) strand; PAM type: YTN; PAM sequence: CTC
cagtctccaggccactgggc

SEQ ID NO: 26635 - DNA, 20 bp, Artificial Sequence
  Description of Artificial Sequence: Synthetic oligonucleotide
  Target: PCSK9; (+) strand; PAM type: YTN; PAM sequence: CTC
caggccactgggccagagct

SEQ ID NO: 26636 - DNA, 20 bp, Artificial Sequence
  Description of Artificial Sequence: Synthetic oligonucleotide
  Target: PCSK9; (+) strand; PAM type: YTN; PAM sequence: CTG
ggccagagctcacaggctgg

SEQ ID NO: 26637 - DNA, 20 bp, Artificial Sequence
  Description of Artificial Sequence: Synthetic oligonucleotide
  Target: PCSK9; (+) strand; PAM type: YTN; PAM sequence: CTC
acaggctggcagagggttag

SEQ ID NO: 26638 - DNA, 20 bp, Artificial Sequence
  Description of Artificial Sequence: Synthetic oligonucleotide
  Target: PCSK9; (+) strand; PAM type: YTN; PAM sequence: CTG
gcagagggttagaactgtta

SEQ ID NO: 26639 - DNA, 20 bp, Artificial Sequence
  Description of Artificial Sequence: Synthetic oligonucleotide
  Target: PCSK9; (+) strand; PAM type: YTN; PAM sequence: TTA
gaactgttactggtggctgg

SEQ ID NO: 26640 - DNA, 20 bp, Artificial Sequence
  Description of Artificial Sequence: Synthetic oligonucleotide
  Target: PCSK9; (+) strand; PAM type: YTN; PAM sequence: CTG
ttactggtggctgggtgcag

SEQ ID NO: 26641 - DNA, 20 bp, Artificial Sequence
  Description of Artificial Sequence: Synthetic oligonucleotide
  Target: PCSK9; (+) strand; PAM type: YTN; PAM sequence: TTA
ctggtggctgggtgcagtgg

SEQ ID NO: 26642 - DNA, 20 bp, Artificial Sequence
  Description of Artificial Sequence: Synthetic oligonucleotide
  Target: PCSK9; (+) strand; PAM type: YTN; PAM sequence: CTG
gtggctgggtgcagtggctc

SEQ ID NO: 26643 - DNA, 20 bp, Artificial Sequence
  Description of Artificial Sequence: Synthetic oligonucleotide
  Target: PCSK9; (+) strand; PAM type: YTN; PAM sequence: CTG
ggtgcagtggctcacgcctg

SEQ ID NO: 26644 - DNA, 20 bp, Artificial Sequence
  Description of Artificial Sequence: Synthetic oligonucleotide
  Target: PCSK9; (+) strand; PAM type: YTN; PAM sequence: CTC
acgcctgtaatcttagcact

SEQ ID NO: 26645 - DNA, 20 bp, Artificial Sequence
  Description of Artificial Sequence: Synthetic oligonucleotide
  Target: PCSK9; (+) strand; PAM type: YTN; PAM sequence: CTG
taatcttagcactttgggag

SEQ ID NO: 26646 - DNA, 20 bp, Artificial Sequence
  Description of Artificial Sequence: Synthetic oligonucleotide
  Target: PCSK9; (+) strand; PAM type: YTN; PAM sequence: CTT
agcactttgggagggcaagg

SEQ ID NO: 26647 - DNA, 20 bp, Artificial Sequence
  Description of Artificial Sequence: Synthetic oligonucleotide
  Target: PCSK9; (+) strand; PAM type: YTN; PAM sequence: TTA
gcactttgggagggcaaggc

SEQ ID NO: 26648 - DNA, 20 bp, Artificial Sequence
  Description of Artificial Sequence: Synthetic oligonucleotide
  Target: PCSK9; (+) strand; PAM type: YTN; PAM sequence: CTT
tgggagggcaaggcgggagg

SEQ ID NO: 26649 - DNA, 20 bp, Artificial Sequence
  Description of Artificial Sequence: Synthetic oligonucleotide
  Target: PCSK9; (+) strand; PAM type: YTN; PAM sequence: TTT
gggagggcaaggcgggagga

SEQ ID NO: 26650 - DNA, 20 bp, Artificial Sequence
  Description of Artificial Sequence: Synthetic oligonucleotide
  Target: PCSK9; (+) strand; PAM type: YTN; PAM sequence: TTG
ggagggcaaggcgggaggat

SEQ ID NO: 26651 - DNA, 20 bp, Artificial Sequence
  Description of Artificial Sequence: Synthetic oligonucleotide
  Target: PCSK9; (+) strand; PAM type: YTN; PAM sequence: CTT
gctaacacggtgaagccccg

SEQ ID NO: 26652 - DNA, 20 bp, Artificial Sequence
  Description of Artificial Sequence: Synthetic oligonucleotide
  Target: PCSK9; (+) strand; PAM type: YTN; PAM sequence: TTG
ctaacacggtgaagccccgt

SEQ ID NO: 26653 - DNA, 20 bp, Artificial Sequence
  Description of Artificial Sequence: Synthetic oligonucleotide
  Target: PCSK9; (+) strand; PAM type: YTN; PAM sequence: CTA
acacggtgaagccccgtctc

SEQ ID NO: 26654 - DNA, 20 bp, Artificial Sequence
  Description of Artificial Sequence: Synthetic oligonucleotide
  Target: PCSK9; (+) strand; PAM type: YTN; PAM sequence: CTC
tactaaaactacaaaaaatt

SEQ ID NO: 26655 - DNA, 20 bp, Artificial Sequence
  Description of Artificial Sequence: Synthetic oligonucleotide
  Target: PCSK9; (+) strand; PAM type: YTN; PAM sequence: CTA
ctaaaactacaaaaaattag

SEQ ID NO: 26656 - DNA, 20 bp, Artificial Sequence
  Description of Artificial Sequence: Synthetic oligonucleotide
  Target: PCSK9; (+) strand; PAM type: YTN; PAM sequence: CTA
aaactacaaaaaattagccg

SEQ ID NO: 26657 - DNA, 20 bp, Artificial Sequence
  Description of Artificial Sequence: Synthetic oligonucleotide
  Target: PCSK9; (+) strand; PAM type: YTN; PAM sequence: CTA
caaaaaattagccgggcgtg

SEQ ID NO: 26658 - DNA, 20 bp, Artificial Sequence
  Description of Artificial Sequence: Synthetic oligonucleotide
  Target: PCSK9; (+) strand; PAM type: YTN; PAM sequence: TTA
gccgggcgtggtggcaggcg

SEQ ID NO: 26659 - DNA, 20 bp, Artificial Sequence
  Description of Artificial Sequence: Synthetic oligonucleotide
  Target: PCSK9; (+) strand; PAM type: YTN; PAM sequence: CTG
tagtcccagctactcaggag

SEQ ID NO: 26660 - DNA, 20 bp, Artificial Sequence
  Description of Artificial Sequence: Synthetic oligonucleotide
  Target: PCSK9; (+) strand; PAM type: YTN; PAM sequence: CTA
ctcaggaggctgaggcagga

SEQ ID NO: 26661 - DNA, 20 bp, Artificial Sequence
  Description of Artificial Sequence: Synthetic oligonucleotide
  Target: PCSK9; (+) strand; PAM type: YTN; PAM sequence: CTC
aggaggctgaggcaggagaa

SEQ ID NO: 26662 - DNA, 20 bp, Artificial Sequence
  Description of Artificial Sequence: Synthetic oligonucleotide
  Target: PCSK9; (+) strand; PAM type: YTN; PAM sequence: CTG
aggcaggagaatggcgtgaa

SEQ ID NO: 26663 - DNA, 20 bp, Artificial Sequence
  Description of Artificial Sequence: Synthetic oligonucleotide
  Target: PCSK9; (+) strand; PAM type: YTN; PAM sequence: CTT
gcagtgagccgagattgcgc

SEQ ID NO: 26664 - DNA, 20 bp, Artificial Sequence
  Description of Artificial Sequence: Synthetic oligonucleotide
  Target: PCSK9; (+) strand; PAM type: YTN; PAM sequence: TTG
cagtgagccgagattgcgcc

SEQ ID NO: 26665 - DNA, 20 bp, Artificial Sequence
  Description of Artificial Sequence: Synthetic oligonucleotide
  Target: PCSK9; (+) strand; PAM type: YTN; PAM sequence: TTG
cgccactgcactccagcctg

SEQ ID NO: 26666 - DNA, 20 bp, Artificial Sequence
  Description of Artificial Sequence: Synthetic oligonucleotide
  Target: PCSK9; (+) strand; PAM type: YTN; PAM sequence: CTG
cactccagcctgggcaatag

SEQ ID NO: 26667 - DNA, 20 bp, Artificial Sequence
  Description of Artificial Sequence: Synthetic oligonucleotide
  Target: PCSK9; (+) strand; PAM type: YTN; PAM sequence: CTC
cagcctgggcaatagagcga

SEQ ID NO: 26668 - DNA, 20 bp, Artificial Sequence
  Description of Artificial Sequence: Synthetic oligonucleotide
  Target: PCSK9; (+) strand; PAM type: YTN; PAM sequence: CTG
ggcaatagagcgagactccg

SEQ ID NO: 26669 - DNA, 20 bp, Artificial Sequence
  Description of Artificial Sequence: Synthetic oligonucleotide
  Target: PCSK9; (+) strand; PAM type: YTN; PAM sequence: CTC
cgtctggaaagaaaaaaaaa

SEQ ID NO: 26670 - DNA, 20 bp, Artificial Sequence
  Description of Artificial Sequence: Synthetic oligonucleotide
  Target: PCSK9; (+) strand; PAM type: YTN; PAM sequence: CTG
gaaagaaaaaaaaaaaaaag

SEQ ID NO: 26671 - DNA, 20 bp, Artificial Sequence
  Description of Artificial Sequence: Synthetic oligonucleotide
  Target: PCSK9; (+) strand; PAM type: YTN; PAM sequence: CTG
ttactgttgacagtagcatg

SEQ ID NO: 26672 - DNA, 20 bp, Artificial Sequence
  Description of Artificial Sequence: Synthetic oligonucleotide
  Target: PCSK9; (+) strand; PAM type: YTN; PAM sequence: TTA
ctgttgacagtagcatgagg

SEQ ID NO: 26673 - DNA, 20 bp, Artificial Sequence
  Description of Artificial Sequence: Synthetic oligonucleotide
  Target: PCSK9; (+) strand; PAM type: YTN; PAM sequence: CTG
ttgacagtagcatgaggtag

SEQ ID NO: 26674 - DNA, 20 bp, Artificial Sequence
  Description of Artificial Sequence: Synthetic oligonucleotide
  Target: PCSK9; (+) strand; PAM type: YTN; PAM sequence: TTG
acagtagcatgaggtagacc

SEQ ID NO: 26675 - DNA, 20 bp, Artificial Sequence
  Description of Artificial Sequence: Synthetic oligonucleotide
  Target: PCSK9; (+) strand; PAM type: YTN; PAM sequence: CTG
caccaaaatgggggagtgga

SEQ ID NO: 26676 - DNA, 20 bp, Artificial Sequence
  Description of Artificial Sequence: Synthetic oligonucleotide
  Target: PCSK9; (+) strand; PAM type: YTN; PAM sequence: CTG
aggccagaaggaaccacacc

SEQ ID NO: 26677 - DNA, 20 bp, Artificial Sequence
  Description of Artificial Sequence: Synthetic oligonucleotide
  Target: PCSK9; (+) strand; PAM type: YTN; PAM sequence: CTC
aagggtggggagttatggta

SEQ ID NO: 26678 - DNA, 20 bp, Artificial Sequence
  Description of Artificial Sequence: Synthetic oligonucleotide
  Target: PCSK9; (+) strand; PAM type: YTN; PAM sequence: TTA
tggtatggggggtcctaggc

SEQ ID NO: 26679 - DNA, 20 bp, Artificial Sequence
  Description of Artificial Sequence: Synthetic oligonucleotide
  Target: PCSK9; (+) strand; PAM type: YTN; PAM sequence: CTA
ggcatggagtcttttaattc

SEQ ID NO: 26680 - DNA, 20 bp, Artificial Sequence
  Description of Artificial Sequence: Synthetic oligonucleotide
  Target: PCSK9; (+) strand; PAM type: YTN; PAM sequence: CTT
ttaattctttagacaatcct

SEQ ID NO: 26681 - DNA, 20 bp, Artificial Sequence
  Description of Artificial Sequence: Synthetic oligonucleotide
  Target: PCSK9; (+) strand; PAM type: YTN; PAM sequence: TTT
taattctttagacaatcctg

SEQ ID NO: 26682 - DNA, 20 bp, Artificial Sequence
  Description of Artificial Sequence: Synthetic oligonucleotide
  Target: PCSK9; (+) strand; PAM type: YTN; PAM sequence: TTT
aattctttagacaatcctgg

SEQ ID NO: 26683 - DNA, 20 bp, Artificial Sequence
  Description of Artificial Sequence: Synthetic oligonucleotide
  Target: PCSK9; (+) strand; PAM type: YTN; PAM sequence: TTA
attctttagacaatcctggg

SEQ ID NO: 26684 - DNA, 20 bp, Artificial Sequence
  Description of Artificial Sequence: Synthetic oligonucleotide
  Target: PCSK9; (+) strand; PAM type: YTN; PAM sequence: TTC
tttagacaatcctgggagca

SEQ ID NO: 26685 - DNA, 20 bp, Artificial Sequence
  Description of Artificial Sequence: Synthetic oligonucleotide
  Target: PCSK9; (+) strand; PAM type: YTN; PAM sequence: CTT
tagacaatcctgggagcaac

SEQ ID NO: 26686 - DNA, 20 bp, Artificial Sequence
  Description of Artificial Sequence: Synthetic oligonucleotide
  Target: PCSK9; (+) strand; PAM type: YTN; PAM sequence: TTT
agacaatcctgggagcaact

SEQ ID NO: 26687 - DNA, 20 bp, Artificial Sequence
  Description of Artificial Sequence: Synthetic oligonucleotide
  Target: PCSK9; (+) strand; PAM type: YTN; PAM sequence: TTA
gacaatcctgggagcaactg

SEQ ID NO: 26688 - DNA, 20 bp, Artificial Sequence
  Description of Artificial Sequence: Synthetic oligonucleotide
  Target: PCSK9; (+) strand; PAM type: YTN; PAM sequence: CTG
ggagcaactgtccctgtttc

SEQ ID NO: 26689 - DNA, 20 bp, Artificial Sequence
  Description of Artificial Sequence: Synthetic oligonucleotide
  Target: PCSK9; (+) strand; PAM type: YTN; PAM sequence: CTG
tccctgtttcacagagggcg

SEQ ID NO: 26690 - DNA, 20 bp, Artificial Sequence
  Description of Artificial Sequence: Synthetic oligonucleotide
  Target: PCSK9; (+) strand; PAM type: YTN; PAM sequence: CTG
tttcacagagggcggggcca

SEQ ID NO: 26691 - DNA, 20 bp, Artificial Sequence
  Description of Artificial Sequence: Synthetic oligonucleotide
  Target: PCSK9; (+) strand; PAM type: YTN; PAM sequence: TTT
cacagagggcggggccacac

SEQ ID NO: 26692 - DNA, 20 bp, Artificial Sequence
  Description of Artificial Sequence: Synthetic oligonucleotide
  Target: PCSK9; (+) strand; PAM type: YTN; PAM sequence: TTC
acagagggcggggccacaca

SEQ ID NO: 26693 - DNA, 20 bp, Artificial Sequence
  Description of Artificial Sequence: Synthetic oligonucleotide
  Target: PCSK9; (+) strand; PAM type: YTN; PAM sequence: CTG
gtgagtgggcagccaagact

SEQ ID NO: 26694 - DNA, 20 bp, Artificial Sequence
  Description of Artificial Sequence: Synthetic oligonucleotide
  Target: PCSK9; (+) strand; PAM type: YTN; PAM sequence: CTC
tgttcaagtttgtgtgggtc

SEQ ID NO: 26695 - DNA, 20 bp, Artificial Sequence
  Description of Artificial Sequence: Synthetic oligonucleotide
  Target: PCSK9; (+) strand; PAM type: YTN; PAM sequence: CTG
ttcaagtttgtgtgggtcca

SEQ ID NO: 26696 - DNA, 20 bp, Artificial Sequence
  Description of Artificial Sequence: Synthetic oligonucleotide
  Target: PCSK9; (+) strand; PAM type: YTN; PAM sequence: TTC
aagtttgtgtgggtccaaca

SEQ ID NO: 26697 - DNA, 20 bp, Artificial Sequence
  Description of Artificial Sequence: Synthetic oligonucleotide
  Target: PCSK9; (+) strand; PAM type: YTN; PAM sequence: TTT
gtgtgggtccaacacttgcg

SEQ ID NO: 26698 - DNA, 20 bp, Artificial Sequence
  Description of Artificial Sequence: Synthetic oligonucleotide
  Target: PCSK9; (+) strand; PAM type: YTN; PAM sequence: TTG
tgtgggtccaacacttgcgg

SEQ ID NO: 26699 - DNA, 20 bp, Artificial Sequence
  Description of Artificial Sequence: Synthetic oligonucleotide
  Target: PCSK9; (+) strand; PAM type: YTN; PAM sequence: CTT
gcggccacggtggaggggca

SEQ ID NO: 26700 - DNA, 20 bp, Artificial Sequence
  Description of Artificial Sequence: Synthetic oligonucleotide
  Target: PCSK9; (+) strand; PAM type: YTN; PAM sequence: TTG
cggccacggtggaggggcat

SEQ ID NO: 26701 - DNA, 20 bp, Artificial Sequence
  Description of Artificial Sequence: Synthetic oligonucleotide
  Target: PCSK9; (+) strand; PAM type: YTN; PAM sequence: CTG
agccaggcctcagagagtgg

SEQ ID NO: 26702 - DNA, 20 bp, Artificial Sequence
  Description of Artificial Sequence: Synthetic oligonucleotide
  Target: PCSK9; (+) strand; PAM type: YTN; PAM sequence: CTC
agagagtggcgggggaagtt

SEQ ID NO: 26703 - DNA, 20 bp, Artificial Sequence
  Description of Artificial Sequence: Synthetic oligonucleotide
  Target: PCSK9; (+) strand; PAM type: YTN; PAM sequence: TTG
ggtggggaagtgtgcccttc

SEQ ID NO: 26704 - DNA, 20 bp, Artificial Sequence
  Description of Artificial Sequence: Synthetic oligonucleotide
  Target: PCSK9; (+) strand; PAM type: YTN; PAM sequence: CTT
ctcattcctctgaggctcat

SEQ ID NO: 26705 - DNA, 20 bp, Artificial Sequence
  Description of Artificial Sequence: Synthetic oligonucleotide
  Target: PCSK9; (+) strand; PAM type: YTN; PAM sequence: TTC
tcattcctctgaggctcatc

SEQ ID NO: 26706 - DNA, 20 bp, Artificial Sequence
  Description of Artificial Sequence: Synthetic oligonucleotide
  Target: PCSK9; (+) strand; PAM type: YTN; PAM sequence: CTC
attcctctgaggctcatcct

SEQ ID NO: 26707 - DNA, 20 bp, Artificial Sequence
  Description of Artificial Sequence: Synthetic oligonucleotide
  Target: PCSK9; (+) strand; PAM type: YTN; PAM sequence: TTC
ctctgaggctcatcctcttg

SEQ ID NO: 26708 - DNA, 20 bp, Artificial Sequence
  Description of Artificial Sequence: Synthetic oligonucleotide
  Target: PCSK9; (+) strand; PAM type: YTN; PAM sequence: CTC
tgaggctcatcctcttggtg

SEQ ID NO: 26709 - DNA, 20 bp, Artificial Sequence
  Description of Artificial Sequence: Synthetic oligonucleotide
  Target: PCSK9; (+) strand; PAM type: YTN; PAM sequence: CTG
aggctcatcctcttggtgcc

SEQ ID NO: 26710 - DNA, 20 bp, Artificial Sequence
  Description of Artificial Sequence: Synthetic oligonucleotide
  Target: PCSK9; (+) strand; PAM type: YTN; PAM sequence: CTC
atcctcttggtgcctctctt

SEQ ID NO: 26711 - DNA, 20 bp, Artificial Sequence
  Description of Artificial Sequence: Synthetic oligonucleotide
  Target: PCSK9; (+) strand; PAM type: YTN; PAM sequence: CTC
ttggtgcctctctttcatgg

SEQ ID NO: 26712 - DNA, 20 bp, Artificial Sequence
  Description of Artificial Sequence: Synthetic oligonucleotide
  Target: PCSK9; (+) strand; PAM type: YTN; PAM sequence: CTT
ggtgcctctctttcatggaa

SEQ ID NO: 26713 - DNA, 20 bp, Artificial Sequence
  Description of Artificial Sequence: Synthetic oligonucleotide
  Target: PCSK9; (+) strand; PAM type: YTN; PAM sequence: TTG
gtgcctctctttcatggaaa

SEQ ID NO: 26714 - DNA, 20 bp, Artificial Sequence
  Description of Artificial Sequence: Synthetic oligonucleotide
  Target: PCSK9; (+) strand; PAM type: YTN; PAM sequence: CTC
tctttcatggaaagggataa

SEQ ID NO: 26715 - DNA, 20 bp, Artificial Sequence
  Description of Artificial Sequence: Synthetic oligonucleotide
  Target: PCSK9; (+) strand; PAM type: YTN; PAM sequence: CTC
tttcatggaaagggataata

SEQ ID NO: 26716 - DNA, 20 bp, Artificial Sequence
  Description of Artificial Sequence: Synthetic oligonucleotide
  Target: PCSK9; (+) strand; PAM type: YTN; PAM sequence: CTT
tcatggaaagggataataag

SEQ ID NO: 26717 - DNA, 20 bp, Artificial Sequence
  Description of Artificial Sequence: Synthetic oligonucleotide
  Target: PCSK9; (+) strand; PAM type: YTN; PAM sequence: TTT
catggaaagggataataagg

SEQ ID NO: 26718 - DNA, 20 bp, Artificial Sequence
  Description of Artificial Sequence: Synthetic oligonucleotide
  Target: PCSK9; (+) strand; PAM type: YTN; PAM sequence: TTC
atggaaagggataataaggt

SEQ ID NO: 26719 - DNA, 20 bp, Artificial Sequence
  Description of Artificial Sequence: Synthetic oligonucleotide
  Target: PCSK9; (+) strand; PAM type: YTN; PAM sequence: TTA
ttgtgaggatcccctgagtt

SEQ ID NO: 26720 - DNA, 20 bp, Artificial Sequence
  Description of Artificial Sequence: Synthetic oligonucleotide
  Target: PCSK9; (+) strand; PAM type: YTN; PAM sequence: TTG
tgaggatcccctgagttcgt

SEQ ID NO: 26721 - DNA, 20 bp, Artificial Sequence
  Description of Artificial Sequence: Synthetic oligonucleotide
  Target: PCSK9; (+) strand; PAM type: YTN; PAM sequence: CTG
agttcgtatattcagacgct

SEQ ID NO: 26722 - DNA, 20 bp, Artificial Sequence
  Description of Artificial Sequence: Synthetic oligonucleotide
  Target: PCSK9; (+) strand; PAM type: YTN; PAM sequence: TTC
gtatattcagacgcttagac

SEQ ID NO: 26723 - DNA, 20 bp, Artificial Sequence
  Description of Artificial Sequence: Synthetic oligonucleotide
  Target: PCSK9; (+) strand; PAM type: YTN; PAM sequence: TTC
agacgcttagacagagccag

SEQ ID NO: 26724 - DNA, 20 bp, Artificial Sequence
  Description of Artificial Sequence: Synthetic oligonucleotide
  Target: PCSK9; (+) strand; PAM type: YTN; PAM sequence: CTT
agacagagccaggcacagag

SEQ ID NO: 26725 - DNA, 20 bp, Artificial Sequence
  Description of Artificial Sequence: Synthetic oligonucleotide
  Target: PCSK9; (+) strand; PAM type: YTN; PAM sequence: TTA
gacagagccaggcacagaga

SEQ ID NO: 26726 - DNA, 20 bp, Artificial Sequence
  Description of Artificial Sequence: Synthetic oligonucleotide
  Target: PCSK9; (+) strand; PAM type: YTN; PAM sequence: TTG
gctagtttgattgctggtgt

SEQ ID NO: 26727 - DNA, 20 bp, Artificial Sequence
  Description of Artificial Sequence: Synthetic oligonucleotide
  Target: PCSK9; (+) strand; PAM type: YTN; PAM sequence: CTA
gtttgattgctggtgtaatt

SEQ ID NO: 26728 - DNA, 20 bp, Artificial Sequence
  Description of Artificial Sequence: Synthetic oligonucleotide
  Target: PCSK9; (+) strand; PAM type: YTN; PAM sequence: TTT
gattgctggtgtaattgcta

SEQ ID NO: 26729 - DNA, 20 bp, Artificial Sequence
  Description of Artificial Sequence: Synthetic oligonucleotide
  Target: PCSK9; (+) strand; PAM type: YTN; PAM sequence: TTG
attgctggtgtaattgctaa

SEQ ID NO: 26730 - DNA, 20 bp, Artificial Sequence
  Description of Artificial Sequence: Synthetic oligonucleotide
  Target: PCSK9; (+) strand; PAM type: YTN; PAM sequence: TTG
ctggtgtaattgctaatatc

SEQ ID NO: 26731 - DNA, 20 bp, Artificial Sequence
  Description of Artificial Sequence: Synthetic oligonucleotide
  Target: PCSK9; (+) strand; PAM type: YTN; PAM sequence: CTG
gtgtaattgctaatatcttc

SEQ ID NO: 26732 - DNA, 20 bp, Artificial Sequence
  Description of Artificial Sequence: Synthetic oligonucleotide
  Target: PCSK9; (+) strand; PAM type: YTN; PAM sequence: TTG
ctaatatcttccagtttgta

SEQ ID NO: 26733 - DNA, 20 bp, Artificial Sequence
  Description of Artificial Sequence: Synthetic oligonucleotide
  Target: PCSK9; (+) strand; PAM type: YTN; PAM sequence: CTA
atatcttccagtttgtattg

SEQ ID NO: 26734 - DNA, 20 bp, Artificial Sequence
  Description of Artificial Sequence: Synthetic oligonucleotide
  Target: PCSK9; (+) strand; PAM type: YTN; PAM sequence: CTT
ccagtttgtattggtcaagg

SEQ ID NO: 26735 - DNA, 20 bp, Artificial Sequence
  Description of Artificial Sequence: Synthetic oligonucleotide
  Target: PCSK9; (+) strand; PAM type: YTN; PAM sequence: TTC
cagtttgtattggtcaaggt

SEQ ID NO: 26736 - DNA, 20 bp, Artificial Sequence
  Description of Artificial Sequence: Synthetic oligonucleotide
  Target: PCSK9; (+) strand; PAM type: YTN; PAM sequence: TTT
gtattggtcaaggttctgca

SEQ ID NO: 26737 - DNA, 20 bp, Artificial Sequence
  Description of Artificial Sequence: Synthetic oligonucleotide
  Target: PCSK9; (+) strand; PAM type: YTN; PAM sequence: TTG
tattggtcaaggttctgcag

SEQ ID NO: 26738 - DNA, 20 bp, Artificial Sequence
  Description of Artificial Sequence: Synthetic oligonucleotide
  Target: PCSK9; (+) strand; PAM type: YTN; PAM sequence: TTG
gtcaaggttctgcagagaag

SEQ ID NO: 26739 - DNA, 20 bp, Artificial Sequence
  Description of Artificial Sequence: Synthetic oligonucleotide
  Target: PCSK9; (+) strand; PAM type: YTN; PAM sequence: TTC
tgcagagaagcagaaccagt

SEQ ID NO: 26740 - DNA, 20 bp, Artificial Sequence
  Description of Artificial Sequence: Synthetic oligonucleotide
  Target: PCSK9; (+) strand; PAM type: YTN; PAM sequence: CTG
cagagaagcagaaccagtag

SEQ ID NO: 26741 - DNA, 20 bp, Artificial Sequence
  Description of Artificial Sequence: Synthetic oligonucleotide
  Target: PCSK9; (+) strand; PAM type: YTN; PAM sequence: TTA
agagtttcaagctcatgtga

SEQ ID NO: 26742 - DNA, 20 bp, Artificial Sequence
  Description of Artificial Sequence: Synthetic oligonucleotide
  Target: PCSK9; (+) strand; PAM type: YTN; PAM sequence: TTT
caagctcatgtgaccgtgcg

SEQ ID NO: 26743 - DNA, 20 bp, Artificial Sequence
  Description of Artificial Sequence: Synthetic oligonucleotide
  Target: PCSK9; (+) strand; PAM type: YTN; PAM sequence: TTC
aagctcatgtgaccgtgcgg

SEQ ID NO: 26744 - DNA, 20 bp, Artificial Sequence
  Description of Artificial Sequence: Synthetic oligonucleotide
  Target: PCSK9; (+) strand; PAM type: YTN; PAM sequence: CTC
atgtgaccgtgcgggctggc

SEQ ID NO: 26745 - DNA, 20 bp, Artificial Sequence
  Description of Artificial Sequence: Synthetic oligonucleotide
  Target: PCSK9; (+) strand; PAM type: YTN; PAM sequence: CTG
gcaagtctgaaatccgcagg

SEQ ID NO: 26746 - DNA, 20 bp, Artificial Sequence
  Description of Artificial Sequence: Synthetic oligonucleotide
  Target: PCSK9; (+) strand; PAM type: YTN; PAM sequence: CTG
aaatccgcagggcaggccag

SEQ ID NO: 26747 - DNA, 20 bp, Artificial Sequence
  Description of Artificial Sequence: Synthetic oligonucleotide
  Target: PCSK9; (+) strand; PAM type: YTN; PAM sequence: CTG
gcaattcctgcagaatttga

SEQ ID NO: 26748 - DNA, 20 bp, Artificial Sequence
  Description of Artificial Sequence: Synthetic oligonucleotide
  Target: PCSK9; (+) strand; PAM type: YTN; PAM sequence: TTC
ctgcagaatttgatgttgca

SEQ ID NO: 26749 - DNA, 20 bp, Artificial Sequence
  Description of Artificial Sequence: Synthetic oligonucleotide
  Target: PCSK9; (+) strand; PAM type: YTN; PAM sequence: CTG
cagaatttgatgttgcaata

SEQ ID NO: 26750 - DNA, 20 bp, Artificial Sequence
  Description of Artificial Sequence: Synthetic oligonucleotide
  Target: PCSK9; (+) strand; PAM type: YTN; PAM sequence: TTT
gatgttgcaatactgagtcc

SEQ ID NO: 26751 - DNA, 20 bp, Artificial Sequence
  Description of Artificial Sequence: Synthetic oligonucleotide
  Target: PCSK9; (+) strand; PAM type: YTN; PAM sequence: TTG
atgttgcaatactgagtcct

SEQ ID NO: 26752 - DNA, 20 bp, Artificial Sequence
  Description of Artificial Sequence: Synthetic oligonucleotide
  Target: PCSK9; (+) strand; PAM type: YTN; PAM sequence: TTG
caatactgagtcctaaggca

SEQ ID NO: 26753 - DNA, 20 bp, Artificial Sequence
  Description of Artificial Sequence: Synthetic oligonucleotide
  Target: PCSK9; (+) strand; PAM type: YTN; PAM sequence: CTG
agtcctaaggcagtcctggg

SEQ ID NO: 26754 - DNA, 20 bp, Artificial Sequence
  Description of Artificial Sequence: Synthetic oligonucleotide
  Target: PCSK9; (+) strand; PAM type: YTN; PAM sequence: CTA
aggcagtcctggggcagaat

SEQ ID NO: 26755 - DNA, 20 bp, Artificial Sequence
  Description of Artificial Sequence: Synthetic oligonucleotide
  Target: PCSK9; (+) strand; PAM type: YTN; PAM sequence: CTG
gggcagaattccttcttccc

SEQ ID NO: 26756 - DNA, 20 bp, Artificial Sequence
  Description of Artificial Sequence: Synthetic oligonucleotide
  Target: PCSK9; (+) strand; PAM type: YTN; PAM sequence: TTC
cttcttccctgggaggcctc

SEQ ID NO: 26757 - DNA, 20 bp, Artificial Sequence
  Description of Artificial Sequence: Synthetic oligonucleotide
  Target: PCSK9; (+) strand; PAM type: YTN; PAM sequence: CTT
cttccctgggaggcctcagt

SEQ ID NO: 26758 - DNA, 20 bp, Artificial Sequence
  Description of Artificial Sequence: Synthetic oligonucleotide
  Target: PCSK9; (+) strand; PAM type: YTN; PAM sequence: TTC
ttccctgggaggcctcagtc

SEQ ID NO: 26759 - DNA, 20 bp, Artificial Sequence
  Description of Artificial Sequence: Synthetic oligonucleotide
  Target: PCSK9; (+) strand; PAM type: YTN; PAM sequence: CTT
ccctgggaggcctcagtctg

SEQ ID NO: 26760 - DNA, 20 bp, Artificial Sequence
  Description of Artificial Sequence: Synthetic oligonucleotide
  Target: PCSK9; (+) strand; PAM type: YTN; PAM sequence: TTC
cctgggaggcctcagtctgt

SEQ ID NO: 26761 - DNA, 20 bp, Artificial Sequence
  Description of Artificial Sequence: Synthetic oligonucleotide
  Target: PCSK9; (+) strand; PAM type: YTN; PAM sequence: CTG
ggaggcctcagtctgttctc

SEQ ID NO: 26762 - DNA, 20 bp, Artificial Sequence
  Description of Artificial Sequence: Synthetic oligonucleotide
  Target: PCSK9; (+) strand; PAM type: YTN; PAM sequence: CTC
agtctgttctcttaaggcct

SEQ ID NO: 26763 - DNA, 20 bp, Artificial Sequence
  Description of Artificial Sequence: Synthetic oligonucleotide
  Target: PCSK9; (+) strand; PAM type: YTN; PAM sequence: CTG
ttctcttaaggccttcaact

SEQ ID NO: 26764 - DNA, 20 bp, Artificial Sequence
  Description of Artificial Sequence: Synthetic oligonucleotide
  Target: PCSK9; (+) strand; PAM type: YTN; PAM sequence: TTC
tcttaaggccttcaactgat

SEQ ID NO: 26765 - DNA, 20 bp, Artificial Sequence
  Description of Artificial Sequence: Synthetic oligonucleotide
  Target: PCSK9; (+) strand; PAM type: YTN; PAM sequence: CTC
ttaaggccttcaactgatta

SEQ ID NO: 26766 - DNA, 20 bp, Artificial Sequence
  Description of Artificial Sequence: Synthetic oligonucleotide
  Target: PCSK9; (+) strand; PAM type: YTN; PAM sequence: CTT
aaggccttcaactgattaaa

SEQ ID NO: 26767 - DNA, 20 bp, Artificial Sequence
  Description of Artificial Sequence: Synthetic oligonucleotide
  Target: PCSK9; (+) strand; PAM type: YTN; PAM sequence: TTA
aggccttcaactgattaaat

SEQ ID NO: 26768 - DNA, 20 bp, Artificial Sequence
  Description of Artificial Sequence: Synthetic oligonucleotide
  Target: PCSK9; (+) strand; PAM type: YTN; PAM sequence: CTT
caactgattaaatgaggcct

SEQ ID NO: 26769 - DNA, 20 bp, Artificial Sequence
  Description of Artificial Sequence: Synthetic oligonucleotide
  Target: PCSK9; (+) strand; PAM type: YTN; PAM sequence: TTC
aactgattaaatgaggcctg

SEQ ID NO: 26770 - DNA, 20 bp, Artificial Sequence
  Description of Artificial Sequence: Synthetic oligonucleotide
  Target: PCSK9; (+) strand; PAM type: YTN; PAM sequence: CTG
attaaatgaggcctgcccaa

SEQ ID NO: 26771 - DNA, 20 bp, Artificial Sequence
  Description of Artificial Sequence: Synthetic oligonucleotide
  Target: PCSK9; (+) strand; PAM type: YTN; PAM sequence: TTA
aatgaggcctgcccaagtta

SEQ ID NO: 26772 - DNA, 20 bp, Artificial Sequence
  Description of Artificial Sequence: Synthetic oligonucleotide
  Target: PCSK9; (+) strand; PAM type: YTN; PAM sequence: CTG
cccaagttatagagagtaac

SEQ ID NO: 26773 - DNA, 20 bp, Artificial Sequence
  Description of Artificial Sequence: Synthetic oligonucleotide
  Target: PCSK9; (+) strand; PAM type: YTN; PAM sequence: TTA
tagagagtaacctgccttac

SEQ ID NO: 26774 - DNA, 20 bp, Artificial Sequence
  Description of Artificial Sequence: Synthetic oligonucleotide
  Target: PCSK9; (+) strand; PAM type: YTN; PAM sequence: CTG
ccttactccgtcttctgatt

SEQ ID NO: 26775 - DNA, 20 bp, Artificial Sequence
  Description of Artificial Sequence: Synthetic oligonucleotide
  Target: PCSK9; (+) strand; PAM type: YTN; PAM sequence: CTT
actccgtcttctgatttaaa

SEQ ID NO: 26776 - DNA, 20 bp, Artificial Sequence
  Description of Artificial Sequence: Synthetic oligonucleotide
  Target: PCSK9; (+) strand; PAM type: YTN; PAM sequence: TTA
ctccgtcttctgatttaaat

SEQ ID NO: 26777 - DNA, 20 bp, Artificial Sequence
  Description of Artificial Sequence: Synthetic oligonucleotide
  Target: PCSK9; (+) strand; PAM type: YTN; PAM sequence: CTC
cgtcttctgatttaaatgtt

SEQ ID NO: 26778 - DNA, 20 bp, Artificial Sequence
  Description of Artificial Sequence: Synthetic oligonucleotide
  Target: PCSK9; (+) strand; PAM type: YTN; PAM sequence: CTT
ctgatttaaatgttagtcac

SEQ ID NO: 26779 - DNA, 20 bp, Artificial Sequence
  Description of Artificial Sequence: Synthetic oligonucleotide
  Target: PCSK9; (+) strand; PAM type: YTN; PAM sequence: TTC
tgatttaaatgttagtcaca

SEQ ID NO: 26780 - DNA, 20 bp, Artificial Sequence
  Description of Artificial Sequence: Synthetic oligonucleotide
  Target: PCSK9; (+) strand; PAM type: YTN; PAM sequence: CTG
atttaaatgttagtcacatc

SEQ ID NO: 26781 - DNA, 20 bp, Artificial Sequence
  Description of Artificial Sequence: Synthetic oligonucleotide
  Target: PCSK9; (+) strand; PAM type: YTN; PAM sequence: TTT
aaatgttagtcacatctaaa

SEQ ID NO: 26782 - DNA, 20 bp, Artificial Sequence
  Description of Artificial Sequence: Synthetic oligonucleotide
  Target: PCSK9; (+) strand; PAM type: YTN; PAM sequence: TTA
aatgttagtcacatctaaaa

SEQ ID NO: 26783 - DNA, 20 bp, Artificial Sequence
  Description of Artificial Sequence: Synthetic oligonucleotide
  Target: PCSK9; (+) strand; PAM type: YTN; PAM sequence: TTA
gtcacatctaaaaaatattt

SEQ ID NO: 26784 - DNA, 20 bp, Artificial Sequence
  Description of Artificial Sequence: Synthetic oligonucleotide
  Target: PCSK9; (+) strand; PAM type: YTN; PAM sequence: CTA
aaaaatattttcgcagcagc

SEQ ID NO: 26785 - DNA, 20 bp, Artificial Sequence
  Description of Artificial Sequence: Synthetic oligonucleotide
  Target: PCSK9; (+) strand; PAM type: YTN; PAM sequence: TTT
tcgcagcagcatttccactg

SEQ ID NO: 26786 - DNA, 20 bp, Artificial Sequence
  Description of Artificial Sequence: Synthetic oligonucleotide
  Target: PCSK9; (+) strand; PAM type: YTN; PAM sequence: TTT
cgcagcagcatttccactgg

SEQ ID NO: 26787 - DNA, 20 bp, Artificial Sequence
  Description of Artificial Sequence: Synthetic oligonucleotide
  Target: PCSK9; (+) strand; PAM type: YTN; PAM sequence: TTC
gcagcagcatttccactggc

SEQ ID NO: 26788 - DNA, 20 bp, Artificial Sequence
  Description of Artificial Sequence: Synthetic oligonucleotide
  Target: PCSK9; (+) strand; PAM type: YTN; PAM sequence: TTT
ccactggcttttgaccaaac

SEQ ID NO: 26789 - DNA, 20 bp, Artificial Sequence
  Description of Artificial Sequence: Synthetic oligonucleotide
  Target: PCSK9; (+) strand; PAM type: YTN; PAM sequence: TTC
cactggcttttgaccaaaca

SEQ ID NO: 26790 - DNA, 20 bp, Artificial Sequence
  Description of Artificial Sequence: Synthetic oligonucleotide
  Target: PCSK9; (+) strand; PAM type: YTN; PAM sequence: CTG
gcttttgaccaaacatcagg

SEQ ID NO: 26791 - DNA, 20 bp, Artificial Sequence
  Description of Artificial Sequence: Synthetic oligonucleotide
  Target: PCSK9; (+) strand; PAM type: YTN; PAM sequence: CTT
ttgaccaaacatcaggccac

SEQ ID NO: 26792 - DNA, 20 bp, Artificial Sequence
  Description of Artificial Sequence: Synthetic oligonucleotide
  Target: PCSK9; (+) strand; PAM type: YTN; PAM sequence: TTT
tgaccaaacatcaggccaca

SEQ ID NO: 26793 - DNA, 20 bp, Artificial Sequence
  Description of Artificial Sequence: Synthetic oligonucleotide
  Target: PCSK9; (+) strand; PAM type: YTN; PAM sequence: TTT
gaccaaacatcaggccacaa

SEQ ID NO: 26794 - DNA, 20 bp, Artificial Sequence
  Description of Artificial Sequence: Synthetic oligonucleotide
  Target: PCSK9; (+) strand; PAM type: YTN; PAM sequence: TTG
accaaacatcaggccacaaa

SEQ ID NO: 26795 - DNA, 20 bp, Artificial Sequence
  Description of Artificial Sequence: Synthetic oligonucleotide
  Target: PCSK9; (+) strand; PAM type: YTN; PAM sequence: TTG
atccccaaaattaaccatca

SEQ ID NO: 26796 - DNA, 20 bp, Artificial Sequence
  Description of Artificial Sequence: Synthetic oligonucleotide
  Target: PCSK9; (+) strand; PAM type: YTN; PAM sequence: TTA
accatcactctgtgcctgta

SEQ ID NO: 26797 - DNA, 20 bp, Artificial Sequence
  Description of Artificial Sequence: Synthetic oligonucleotide
  Target: PCSK9; (+) strand; PAM type: YTN; PAM sequence: CTC
tgtgcctgtaagggaggggc

SEQ ID NO: 26798 - DNA, 20 bp, Artificial Sequence
  Description of Artificial Sequence: Synthetic oligonucleotide
  Target: PCSK9; (+) strand; PAM type: YTN; PAM sequence: CTG
tgcctgtaagggaggggctg

SEQ ID NO: 26799 - DNA, 20 bp, Artificial Sequence
  Description of Artificial Sequence: Synthetic oligonucleotide
  Target: PCSK9; (+) strand; PAM type: YTN; PAM sequence: CTG
taagggaggggctgggaaag

SEQ ID NO: 26800 - DNA, 20 bp, Artificial Sequence
  Description of Artificial Sequence: Synthetic oligonucleotide
  Target: PCSK9; (+) strand; PAM type: YTN; PAM sequence: CTG
ggaaaggggagcaggtctcc

SEQ ID NO: 26801 - DNA, 20 bp, Artificial Sequence
  Description of Artificial Sequence: Synthetic oligonucleotide
  Target: PCSK9; (+) strand; PAM type: YTN; PAM sequence: CTC
cccaaggggtgaccttggct

SEQ ID NO: 26802 - DNA, 20 bp, Artificial Sequence
  Description of Artificial Sequence: Synthetic oligonucleotide
  Target: PCSK9; (+) strand; PAM type: YTN; PAM sequence: CTT
ggctttgttcctcccaggcc

SEQ ID NO: 26803 - DNA, 20 bp, Artificial Sequence
  Description of Artificial Sequence: Synthetic oligonucleotide
  Target: PCSK9; (+) strand; PAM type: YTN; PAM sequence: TTG
gctttgttcctcccaggcct

SEQ ID NO: 26804 - DNA, 20 bp, Artificial Sequence
  Description of Artificial Sequence: Synthetic oligonucleotide
  Target: PCSK9; (+) strand; PAM type: YTN; PAM sequence: CTT
tgttcctcccaggcctggag

SEQ ID NO: 26805 - DNA, 20 bp, Artificial Sequence
  Description of Artificial Sequence: Synthetic oligonucleotide
  Target: PCSK9; (+) strand; PAM type: YTN; PAM sequence: TTT
gttcctcccaggcctggagt

SEQ ID NO: 26806 - DNA, 20 bp, Artificial Sequence
  Description of Artificial Sequence: Synthetic oligonucleotide
  Target: PCSK9; (+) strand; PAM type: YTN; PAM sequence: TTG
ttcctcccaggcctggagtt

SEQ ID NO: 26807 - DNA, 20 bp, Artificial Sequence
  Description of Artificial Sequence: Synthetic oligonucleotide
  Target: PCSK9; (+) strand; PAM type: YTN; PAM sequence: TTC
ctcccaggcctggagtttat

SEQ ID NO: 26808 - DNA, 20 bp, Artificial Sequence
  Description of Artificial Sequence: Synthetic oligonucleotide
  Target: PCSK9; (+) strand; PAM type: YTN; PAM sequence: CTC
ccaggcctggagtttattcg

SEQ ID NO: 26809 - DNA, 20 bp, Artificial Sequence
  Description of Artificial Sequence: Synthetic oligonucleotide
  Target: PCSK9; (+) strand; PAM type: YTN; PAM sequence: CTG
gagtttattcggaaaagcca

SEQ ID NO: 26810 - DNA, 20 bp, Artificial Sequence
  Description of Artificial Sequence: Synthetic oligonucleotide
  Target: PCSK9; (+) strand; PAM type: YTN; PAM sequence: TTT
attcggaaaagccagctggt

SEQ ID NO: 26811 - DNA, 20 bp, Artificial Sequence
  Description of Artificial Sequence: Synthetic oligonucleotide
  Target: PCSK9; (+) strand; PAM type: YTN; PAM sequence: TTA
ttcggaaaagccagctggtc

SEQ ID NO: 26812 - DNA, 20 bp, Artificial Sequence
  Description of Artificial Sequence: Synthetic oligonucleotide
  Target: PCSK9; (+) strand; PAM type: YTN; PAM sequence: TTC
ggaaaagccagctggtccag

SEQ ID NO: 26813 - DNA, 20 bp, Artificial Sequence
  Description of Artificial Sequence: Synthetic oligonucleotide
  Target: PCSK9; (+) strand; PAM type: YTN; PAM sequence: CTG
gtccagcctgtggggccact

SEQ ID NO: 26814 - DNA, 20 bp, Artificial Sequence
  Description of Artificial Sequence: Synthetic oligonucleotide
  Target: PCSK9; (+) strand; PAM type: YTN; PAM sequence: CTG
tggggccactggtggtgctg

SEQ ID NO: 26815 - DNA, 20 bp, Artificial Sequence
  Description of Artificial Sequence: Synthetic oligonucleotide
  Target: PCSK9; (+) strand; PAM type: YTN; PAM sequence: CTG
gtggtgctgctgcccctggc

SEQ ID NO: 26816 - DNA, 20 bp, Artificial Sequence
  Description of Artificial Sequence: Synthetic oligonucleotide
  Target: PCSK9; (+) strand; PAM type: YTN; PAM sequence: CTG
ctgcccctggcgggtgggta

SEQ ID NO: 26817 - DNA, 20 bp, Artificial Sequence
  Description of Artificial Sequence: Synthetic oligonucleotide
  Target: PCSK9; (+) strand; PAM type: YTN; PAM sequence: CTG
cccctggcgggtgggtacag

SEQ ID NO: 26818 - DNA, 20 bp, Artificial Sequence
  Description of Artificial Sequence: Synthetic oligonucleotide
  Target: PCSK9; (+) strand; PAM type: YTN; PAM sequence: CTG
gcgggtgggtacagccgcgt

SEQ ID NO: 26819 - DNA, 20 bp, Artificial Sequence
  Description of Artificial Sequence: Synthetic oligonucleotide
  Target: PCSK9; (+) strand; PAM type: YTN; PAM sequence: CTC
aacgccgcctgccagcgcct

SEQ ID NO: 26820 - DNA, 20 bp, Artificial Sequence
  Description of Artificial Sequence: Synthetic oligonucleotide
  Target: PCSK9; (+) strand; PAM type: YTN; PAM sequence: CTG
ccagcgcctggcgagggctg

SEQ ID NO: 26821 - DNA, 20 bp, Artificial Sequence
  Description of Artificial Sequence: Synthetic oligonucleotide
  Target: PCSK9; (+) strand; PAM type: YTN; PAM sequence: CTG
gcgagggctggggtcgtgct

SEQ ID NO: 26822 - DNA, 20 bp, Artificial Sequence
  Description of Artificial Sequence: Synthetic oligonucleotide
  Target: PCSK9; (+) strand; PAM type: YTN; PAM sequence: CTG
gggtcgtgctggtcaccgct

SEQ ID NO: 26823 - DNA, 20 bp, Artificial Sequence
  Description of Artificial Sequence: Synthetic oligonucleotide
  Target: PCSK9; (+) strand; PAM type: YTN; PAM sequence: CTG
gtcaccgctgccggcaactt

SEQ ID NO: 26824 - DNA, 20 bp, Artificial Sequence
  Description of Artificial Sequence: Synthetic oligonucleotide
  Target: PCSK9; (+) strand; PAM type: YTN; PAM sequence: CTG
ccggcaacttccgggacgat

SEQ ID NO: 26825 - DNA, 20 bp, Artificial Sequence
  Description of Artificial Sequence: Synthetic oligonucleotide
  Target: PCSK9; (+) strand; PAM type: YTN; PAM sequence: CTT
ccgggacgatgcctgcctct

SEQ ID NO: 26826 - DNA, 20 bp, Artificial Sequence
  Description of Artificial Sequence: Synthetic oligonucleotide
  Target: PCSK9; (+) strand; PAM type: YTN; PAM sequence: TTC
cgggacgatgcctgcctcta

SEQ ID NO: 26827 - DNA, 20 bp, Artificial Sequence
  Description of Artificial Sequence: Synthetic oligonucleotide
  Target: PCSK9; (+) strand; PAM type: YTN; PAM sequence: CTG
cctctactccccagcctcag

SEQ ID NO: 26828 - DNA, 20 bp, Artificial Sequence
  Description of Artificial Sequence: Synthetic oligonucleotide
  Target: PCSK9; (+) strand; PAM type: YTN; PAM sequence: CTC
tactccccagcctcagctcc

SEQ ID NO: 26829 - DNA, 20 bp, Artificial Sequence
  Description of Artificial Sequence: Synthetic oligonucleotide
  Target: PCSK9; (+) strand; PAM type: YTN; PAM sequence: CTA
ctccccagcctcagctcccg

SEQ ID NO: 26830 - DNA, 20 bp, Artificial Sequence
  Description of Artificial Sequence: Synthetic oligonucleotide
  Target: PCSK9; (+) strand; PAM type: YTN; PAM sequence: CTC
cccagcctcagctcccgagg

SEQ ID NO: 26831 - DNA, 20 bp, Artificial Sequence
  Description of Artificial Sequence: Synthetic oligonucleotide
  Target: PCSK9; (+) strand; PAM type: YTN; PAM sequence: CTC
agctcccgaggtaggtgctg

SEQ ID NO: 26832 - DNA, 20 bp, Artificial Sequence
  Description of Artificial Sequence: Synthetic oligonucleotide
  Target: PCSK9; (+) strand; PAM type: YTN; PAM sequence: CTC
ccgaggtaggtgctggggct

SEQ ID NO: 26833 - DNA, 20 bp, Artificial Sequence
  Description of Artificial Sequence: Synthetic oligonucleotide
  Target: PCSK9; (+) strand; PAM type: YTN; PAM sequence: CTG
gggctgctgccccaaggcgc

SEQ ID NO: 26834 - DNA, 20 bp, Artificial Sequence
  Description of Artificial Sequence: Synthetic oligonucleotide
  Target: PCSK9; (+) strand; PAM type: YTN; PAM sequence: CTG
ctgccccaaggcgcgggtag

SEQ ID NO: 26835 - DNA, 20 bp, Artificial Sequence
  Description of Artificial Sequence: Synthetic oligonucleotide
  Target: PCSK9; (+) strand; PAM type: YTN; PAM sequence: CTG
ccccaaggcgcgggtagggg

SEQ ID NO: 26836 - DNA, 20 bp, Artificial Sequence
  Description of Artificial Sequence: Synthetic oligonucleotide
  Target: PCSK9; (+) strand; PAM type: YTN; PAM sequence: CTT
cttgtggcacgtgggcttct

SEQ ID NO: 26837 - DNA, 20 bp, Artificial Sequence
  Description of Artificial Sequence: Synthetic oligonucleotide
  Target: PCSK9; (+) strand; PAM type: YTN; PAM sequence: TTC
ttgtggcacgtgggcttctt

SEQ ID NO: 26838 - DNA, 20 bp, Artificial Sequence
  Description of Artificial Sequence: Synthetic oligonucleotide
  Target: PCSK9; (+) strand; PAM type: YTN; PAM sequence: CTT
gtggcacgtgggcttcttgt

SEQ ID NO: 26839 - DNA, 20 bp, Artificial Sequence
  Description of Artificial Sequence: Synthetic oligonucleotide
  Target: PCSK9; (+) strand; PAM type: YTN; PAM sequence: TTG
tggcacgtgggcttcttgtg

SEQ ID NO: 26840 - DNA, 20 bp, Artificial Sequence
  Description of Artificial Sequence: Synthetic oligonucleotide
  Target: PCSK9; (+) strand; PAM type: YTN; PAM sequence: CTT
cttgtggcacgttcctggag

SEQ ID NO: 26841 - DNA, 20 bp, Artificial Sequence
  Description of Artificial Sequence: Synthetic oligonucleotide
  Target: PCSK9; (+) strand; PAM type: YTN; PAM sequence: TTC
ttgtggcacgttcctggagg

SEQ ID NO: 26842 - DNA, 20 bp, Artificial Sequence
  Description of Artificial Sequence: Synthetic oligonucleotide
  Target: PCSK9; (+) strand; PAM type: YTN; PAM sequence: CTT
gtggcacgttcctggaggcc

SEQ ID NO: 26843 - DNA, 20 bp, Artificial Sequence
  Description of Artificial Sequence: Synthetic oligonucleotide
  Target: PCSK9; (+) strand; PAM type: YTN; PAM sequence: TTG
tggcacgttcctggaggccg

SEQ ID NO: 26844 - DNA, 20 bp, Artificial Sequence
  Description of Artificial Sequence: Synthetic oligonucleotide
  Target: PCSK9; (+) strand; PAM type: YTN; PAM sequence: TTC
ctggaggccgaacccttctg

SEQ ID NO: 26845 - DNA, 20 bp, Artificial Sequence
  Description of Artificial Sequence: Synthetic oligonucleotide
  Target: PCSK9; (+) strand; PAM type: YTN; PAM sequence: CTG
gaggccgaacccttctggct

SEQ ID NO: 26846 - DNA, 20 bp, Artificial Sequence
  Description of Artificial Sequence: Synthetic oligonucleotide
  Target: PCSK9; (+) strand; PAM type: YTN; PAM sequence: CTT
ctggctttggaaggagtcgt

SEQ ID NO: 26847 - DNA, 20 bp, Artificial Sequence
  Description of Artificial Sequence: Synthetic oligonucleotide
  Target: PCSK9; (+) strand; PAM type: YTN; PAM sequence: TTC
tggctttggaaggagtcgtc

SEQ ID NO: 26848 - DNA, 20 bp, Artificial Sequence
  Description of Artificial Sequence: Synthetic oligonucleotide
  Target: PCSK9; (+) strand; PAM type: YTN; PAM sequence: CTG
gctttggaaggagtcgtcag

SEQ ID NO: 26849 - DNA, 20 bp, Artificial Sequence
  Description of Artificial Sequence: Synthetic oligonucleotide
  Target: PCSK9; (+) strand; PAM type: YTN; PAM sequence: CTT
tggaaggagtcgtcagagac

SEQ ID NO: 26850 - DNA, 20 bp, Artificial Sequence
  Description of Artificial Sequence: Synthetic oligonucleotide
  Target: PCSK9; (+) strand; PAM type: YTN; PAM sequence: TTT
ggaaggagtcgtcagagacc

SEQ ID NO: 26851 - DNA, 20 bp, Artificial Sequence
  Description of Artificial Sequence: Synthetic oligonucleotide
  Target: PCSK9; (+) strand; PAM type: YTN; PAM sequence: TTG
gaaggagtcgtcagagaccc

SEQ ID NO: 26852 - DNA, 20 bp, Artificial Sequence
  Description of Artificial Sequence: Synthetic oligonucleotide
  Target: PCSK9; (+) strand; PAM type: YTN; PAM sequence: CTG
gggaggaaggggctcgaaac

SEQ ID NO: 26853 - DNA, 20 bp, Artificial Sequence
  Description of Artificial Sequence: Synthetic oligonucleotide
  Target: PCSK9; (+) strand; PAM type: YTN; PAM sequence: CTC
gaaacctccatcatcgcaga

SEQ ID NO: 26854 - DNA, 20 bp, Artificial Sequence
  Description of Artificial Sequence: Synthetic oligonucleotide
  Target: PCSK9; (+) strand; PAM type: YTN; PAM sequence: CTC
catcatcgcagagtctgaat

SEQ ID NO: 26855 - DNA, 20 bp, Artificial Sequence
  Description of Artificial Sequence: Synthetic oligonucleotide
  Target: PCSK9; (+) strand; PAM type: YTN; PAM sequence: CTG
aatagcagtggccccgccat

SEQ ID NO: 26856 - DNA, 20 bp, Artificial Sequence
  Description of Artificial Sequence: Synthetic oligonucleotide
  Target: PCSK9; (+) strand; PAM type: YTN; PAM sequence: CTA
cgtagccacgcccccacacc

SEQ ID NO: 26857 - DNA, 20 bp, Artificial Sequence
  Description of Artificial Sequence: Synthetic oligonucleotide
  Target: PCSK9; (+) strand; PAM type: YTN; PAM sequence: CTG
gccactctccctcctgaagg

SEQ ID NO: 26858 - DNA, 20 bp, Artificial Sequence
  Description of Artificial Sequence: Synthetic oligonucleotide
  Target: PCSK9; (+) strand; PAM type: YTN; PAM sequence: CTC
tccctcctgaaggtcttctg

SEQ ID NO: 26859 - DNA, 20 bp, Artificial Sequence
  Description of Artificial Sequence: Synthetic oligonucleotide
  Target: PCSK9; (+) strand; PAM type: YTN; PAM sequence: CTC
cctcctgaaggtcttctggt

SEQ ID NO: 26860 - DNA, 20 bp, Artificial Sequence
  Description of Artificial Sequence: Synthetic oligonucleotide
  Target: PCSK9; (+) strand; PAM type: YTN; PAM sequence: CTC
ctgaaggtcttctggtaccc

SEQ ID NO: 26861 - DNA, 20 bp, Artificial Sequence
  Description of Artificial Sequence: Synthetic oligonucleotide
  Target: PCSK9; (+) strand; PAM type: YTN; PAM sequence: CTG
aaggtcttctggtacccgcc

SEQ ID NO: 26862 - DNA, 20 bp, Artificial Sequence
  Description of Artificial Sequence: Synthetic oligonucleotide
  Target: PCSK9; (+) strand; PAM type: YTN; PAM sequence: CTT
ctggtacccgccccctcccc

SEQ ID NO: 26863 - DNA, 20 bp, Artificial Sequence
  Description of Artificial Sequence: Synthetic oligonucleotide
  Target: PCSK9; (+) strand; PAM type: YTN; PAM sequence: TTC
tggtacccgccccctcccca

SEQ ID NO: 26864 - DNA, 20 bp, Artificial Sequence
  Description of Artificial Sequence: Synthetic oligonucleotide
  Target: PCSK9; (+) strand; PAM type: YTN; PAM sequence: CTG
gtacccgccccctccccatc

SEQ ID NO: 26865 - DNA, 20 bp, Artificial Sequence
  Description of Artificial Sequence: Synthetic oligonucleotide
  Target: PCSK9; (+) strand; PAM type: YTN; PAM sequence: CTC
cccatctccatccccaggcc

SEQ ID NO: 26866 - DNA, 20 bp, Artificial Sequence
  Description of Artificial Sequence: Synthetic oligonucleotide
  Target: PCSK9; (+) strand; PAM type: YTN; PAM sequence: CTC
catccccaggccctgcgtcc

SEQ ID NO: 26867 - DNA, 20 bp, Artificial Sequence
  Description of Artificial Sequence: Synthetic oligonucleotide
  Target: PCSK9; (+) strand; PAM type: YTN; PAM sequence: CTG
cgtcctctgcccaatactct

SEQ ID NO: 26868 - DNA, 20 bp, Artificial Sequence
  Description of Artificial Sequence: Synthetic oligonucleotide
  Target: PCSK9; (+) strand; PAM type: YTN; PAM sequence: CTC
tgcccaatactctttgggcc

SEQ ID NO: 26869 - DNA, 20 bp, Artificial Sequence
  Description of Artificial Sequence: Synthetic oligonucleotide
  Target: PCSK9; (+) strand; PAM type: YTN; PAM sequence: CTG
cccaatactctttgggcctc

SEQ ID NO: 26870 - DNA, 20 bp, Artificial Sequence
  Description of Artificial Sequence: Synthetic oligonucleotide
  Target: PCSK9; (+) strand; PAM type: YTN; PAM sequence: CTC
tttgggcctccctgttgtcc

SEQ ID NO: 26871 - DNA, 20 bp, Artificial Sequence
  Description of Artificial Sequence: Synthetic oligonucleotide
  Target: PCSK9; (+) strand; PAM type: YTN; PAM sequence: CTT
tgggcctccctgttgtccag

SEQ ID NO: 26872 - DNA, 20 bp, Artificial Sequence
  Description of Artificial Sequence: Synthetic oligonucleotide
  Target: PCSK9; (+) strand; PAM type: YTN; PAM sequence: TTT
gggcctccctgttgtccagc

SEQ ID NO: 26873 - DNA, 20 bp, Artificial Sequence
  Description of Artificial Sequence: Synthetic oligonucleotide
  Target: PCSK9; (+) strand; PAM type: YTN; PAM sequence: TTG
ggcctccctgttgtccagct

SEQ ID NO: 26874 - DNA, 20 bp, Artificial Sequence
  Description of Artificial Sequence: Synthetic oligonucleotide
  Target: PCSK9; (+) strand; PAM type: YTN; PAM sequence: CTC
cctgttgtccagctctctcc

SEQ ID NO: 26875 - DNA, 20 bp, Artificial Sequence
  Description of Artificial Sequence: Synthetic oligonucleotide
  Target: PCSK9; (+) strand; PAM type: YTN; PAM sequence: CTG
ttgtccagctctctccgcgg

SEQ ID NO: 26876 - DNA, 20 bp, Artificial Sequence
  Description of Artificial Sequence: Synthetic oligonucleotide
  Target: PCSK9; (+) strand; PAM type: YTN; PAM sequence: TTG
tccagctctctccgcggctc

SEQ ID NO: 26877 - DNA, 20 bp, Artificial Sequence
  Description of Artificial Sequence: Synthetic oligonucleotide
  Target: PCSK9; (+) strand; PAM type: YTN; PAM sequence: CTC
tctccgcggctccatgactg

SEQ ID NO: 26878 - DNA, 20 bp, Artificial Sequence
  Description of Artificial Sequence: Synthetic oligonucleotide
  Target: PCSK9; (+) strand; PAM type: YTN; PAM sequence: CTC
tccgcggctccatgactgac

SEQ ID NO: 26879 - DNA, 20 bp, Artificial Sequence
  Description of Artificial Sequence: Synthetic oligonucleotide
  Target: PCSK9; (+) strand; PAM type: YTN; PAM sequence: CTC
cgcggctccatgactgacaa

SEQ ID NO: 26880 - DNA, 20 bp, Artificial Sequence
  Description of Artificial Sequence: Synthetic oligonucleotide
  Target: PCSK9; (+) strand; PAM type: YTN; PAM sequence: CTC
catgactgacaacttgagca

SEQ ID NO: 26881 - DNA, 20 bp, Artificial Sequence
  Description of Artificial Sequence: Synthetic oligonucleotide
  Target: PCSK9; (+) strand; PAM type: YTN; PAM sequence: CTG
acaacttgagcaaggctaat

SEQ ID NO: 26882 - DNA, 20 bp, Artificial Sequence
  Description of Artificial Sequence: Synthetic oligonucleotide
  Target: PCSK9; (+) strand; PAM type: YTN; PAM sequence: CTT
gagcaaggctaatgtgaatg

SEQ ID NO: 26883 - DNA, 20 bp, Artificial Sequence
  Description of Artificial Sequence: Synthetic oligonucleotide
  Target: PCSK9; (+) strand; PAM type: YTN; PAM sequence: TTG
agcaaggctaatgtgaatgg

SEQ ID NO: 26884 - DNA, 20 bp, Artificial Sequence
  Description of Artificial Sequence: Synthetic oligonucleotide
  Target: PCSK9; (+) strand; PAM type: YTN; PAM sequence: CTA
atgtgaatgggagcggttga

SEQ ID NO: 26885 - DNA, 20 bp, Artificial Sequence
  Description of Artificial Sequence: Synthetic oligonucleotide
  Target: PCSK9; (+) strand; PAM type: YTN; PAM sequence: TTG
agggctcagacctctcaccc

SEQ ID NO: 26886 - DNA, 20 bp, Artificial Sequence
  Description of Artificial Sequence: Synthetic oligonucleotide
  Target: PCSK9; (+) strand; PAM type: YTN; PAM sequence: CTC
agacctctcacccgaggaac

SEQ ID NO: 26887 - DNA, 20 bp, Artificial Sequence
  Description of Artificial Sequence: Synthetic oligonucleotide
  Target: PCSK9; (+) strand; PAM type: YTN; PAM sequence: CTC
tcacccgaggaacatccaca

SEQ ID NO: 26888 - DNA, 20 bp, Artificial Sequence
  Description of Artificial Sequence: Synthetic oligonucleotide
  Target: PCSK9; (+) strand; PAM type: YTN; PAM sequence: CTC
acccgaggaacatccacaga

SEQ ID NO: 26889 - DNA, 20 bp, Artificial Sequence
  Description of Artificial Sequence: Synthetic oligonucleotide
  Target: PCSK9; (+) strand; PAM type: YTN; PAM sequence: CTG
cggggacacagacacggagc

SEQ ID NO: 26890 - DNA, 20 bp, Artificial Sequence
  Description of Artificial Sequence: Synthetic oligonucleotide
  Target: PCSK9; (+) strand; PAM type: YTN; PAM sequence: CTC
ggccctgaggagctgggggg

SEQ ID NO: 26891 - DNA, 20 bp, Artificial Sequence
  Description of Artificial Sequence: Synthetic oligonucleotide
  Target: PCSK9; (+) strand; PAM type: YTN; PAM sequence: CTG
aggagctggggggcagtgac

SEQ ID NO: 26892 - DNA, 20 bp, Artificial Sequence
  Description of Artificial Sequence: Synthetic oligonucleotide
  Target: PCSK9; (+) strand; PAM type: YTN; PAM sequence: CTG
gggggcagtgaccgtccctc

SEQ ID NO: 26893 - DNA, 20 bp, Artificial Sequence
  Description of Artificial Sequence: Synthetic oligonucleotide
  Target: PCSK9; (+) strand; PAM type: YTN; PAM sequence: CTC
ctctgacccaccactcctcc

SEQ ID NO: 26894 - DNA, 20 bp, Artificial Sequence
  Description of Artificial Sequence: Synthetic oligonucleotide
  Target: PCSK9; (+) strand; PAM type: YTN; PAM sequence: CTC
tgacccaccactcctccagt

SEQ ID NO: 26895 - DNA, 20 bp, Artificial Sequence
  Description of Artificial Sequence: Synthetic oligonucleotide
  Target: PCSK9; (+) strand; PAM type: YTN; PAM sequence: CTG
acccaccactcctccagtgt

SEQ ID NO: 26896 - DNA, 20 bp, Artificial Sequence
  Description of Artificial Sequence: Synthetic oligonucleotide
  Target: PCSK9; (+) strand; PAM type: YTN; PAM sequence: CTC
ctccagtgtcaggacactgc

SEQ ID NO: 26897 - DNA, 20 bp, Artificial Sequence
  Description of Artificial Sequence: Synthetic oligonucleotide
  Target: PCSK9; (+) strand; PAM type: YTN; PAM sequence: CTC
cagtgtcaggacactgcggg

SEQ ID NO: 26898 - DNA, 20 bp, Artificial Sequence
  Description of Artificial Sequence: Synthetic oligonucleotide
  Target: PCSK9; (+) strand; PAM type: YTN; PAM sequence: CTG
cgggtatctaggggaaggaa

SEQ ID NO: 26899 - DNA, 20 bp, Artificial Sequence
  Description of Artificial Sequence: Synthetic oligonucleotide
  Target: PCSK9; (+) strand; PAM type: YTN; PAM sequence: CTA
ggggaaggaatcttgttcca

SEQ ID NO: 26900 - DNA, 20 bp, Artificial Sequence
  Description of Artificial Sequence: Synthetic oligonucleotide
  Target: PCSK9; (+) strand; PAM type: YTN; PAM sequence: CTT
gttccacttcaagtctggaa

SEQ ID NO: 26901 - DNA, 20 bp, Artificial Sequence
  Description of Artificial Sequence: Synthetic oligonucleotide
  Target: PCSK9; (+) strand; PAM type: YTN; PAM sequence: TTG
ttccacttcaagtctggaac

SEQ ID NO: 26902 - DNA, 20 bp, Artificial Sequence
  Description of Artificial Sequence: Synthetic oligonucleotide
  Target: PCSK9; (+) strand; PAM type: YTN; PAM sequence: TTC
cacttcaagtctggaacttc

SEQ ID NO: 26903 - DNA, 20 bp, Artificial Sequence
  Description of Artificial Sequence: Synthetic oligonucleotide
  Target: PCSK9; (+) strand; PAM type: YTN; PAM sequence: CTT
caagtctggaacttcaagtc

SEQ ID NO: 26904 - DNA, 20 bp, Artificial Sequence
  Description of Artificial Sequence: Synthetic oligonucleotide
  Target: PCSK9; (+) strand; PAM type: YTN; PAM sequence: TTC
aagtctggaacttcaagtct

SEQ ID NO: 26905 - DNA, 20 bp, Artificial Sequence
  Description of Artificial Sequence: Synthetic oligonucleotide
  Target: PCSK9; (+) strand; PAM type: YTN; PAM sequence: CTG
gaacttcaagtctgtgtgtg

SEQ ID NO: 26906 - DNA, 20 bp, Artificial Sequence
  Description of Artificial Sequence: Synthetic oligonucleotide
  Target: PCSK9; (+) strand; PAM type: YTN; PAM sequence: CTT
caagtctgtgtgtgtgcgtg

SEQ ID NO: 26907 - DNA, 20 bp, Artificial Sequence
  Description of Artificial Sequence: Synthetic oligonucleotide
  Target: PCSK9; (+) strand; PAM type: YTN; PAM sequence: TTC
aagtctgtgtgtgtgcgtgc

SEQ ID NO: 26908 - DNA, 20 bp, Artificial Sequence
  Description of Artificial Sequence: Synthetic oligonucleotide
  Target: PCSK9; (+) strand; PAM type: YTN; PAM sequence: CTG
tgtgtgtgcgtgcgcgcgcg

SEQ ID NO: 26909 - DNA, 20 bp, Artificial Sequence
  Description of Artificial Sequence: Synthetic oligonucleotide
  Target: PCSK9; (+) strand; PAM type: YTN; PAM sequence: TTG
ggggtgggggttgcagagca

SEQ ID NO: 26910 - DNA, 20 bp, Artificial Sequence
  Description of Artificial Sequence: Synthetic oligonucleotide
  Target: PCSK9; (+) strand; PAM type: YTN; PAM sequence: TTG
cagagcagatgcgtacctga

SEQ ID NO: 26911 - DNA, 20 bp, Artificial Sequence
  Description of Artificial Sequence: Synthetic oligonucleotide
  Target: PCSK9; (+) strand; PAM type: YTN; PAM sequence: CTG
acagcggtaacctaggtccc

SEQ ID NO: 26912 - DNA, 20 bp, Artificial Sequence
  Description of Artificial Sequence: Synthetic oligonucleotide
  Target: PCSK9; (+) strand; PAM type: YTN; PAM sequence: CTA
ggtcccccctggcctatcaa

SEQ ID NO: 26913 - DNA, 20 bp, Artificial Sequence
  Description of Artificial Sequence: Synthetic oligonucleotide
  Target: PCSK9; (+) strand; PAM type: YTN; PAM sequence: CTG
gcctatcaaggcttccctgg

SEQ ID NO: 26914 - DNA, 20 bp, Artificial Sequence
  Description of Artificial Sequence: Synthetic oligonucleotide
  Target: PCSK9; (+) strand; PAM type: YTN; PAM sequence: CTA
tcaaggcttccctggcggcc

SEQ ID NO: 26915 - DNA, 20 bp, Artificial Sequence
  Description of Artificial Sequence: Synthetic oligonucleotide
  Target: PCSK9; (+) strand; PAM type: YTN; PAM sequence: CTT
ccctggcggccgaatttaaa

SEQ ID NO: 26916 - DNA, 20 bp, Artificial Sequence
  Description of Artificial Sequence: Synthetic oligonucleotide
  Target: PCSK9; (+) strand; PAM type: YTN; PAM sequence: TTC
cctggcggccgaatttaaag

SEQ ID NO: 26917 - DNA, 20 bp, Artificial Sequence
  Description of Artificial Sequence: Synthetic oligonucleotide
  Target: PCSK9; (+) strand; PAM type: YTN; PAM sequence: CTG
gcggccgaatttaaaggcat

SEQ ID NO: 26918 - DNA, 20 bp, Artificial Sequence
  Description of Artificial Sequence: Synthetic oligonucleotide
  Target: PCSK9; (+) strand; PAM type: YTN; PAM sequence: TTT
aaaggcatcaagcaaacaaa

SEQ ID NO: 26919 - DNA, 20 bp, Artificial Sequence
  Description of Artificial Sequence: Synthetic oligonucleotide
  Target: PCSK9; (+) strand; PAM type: YTN; PAM sequence: TTA
aaggcatcaagcaaacaaag

SEQ ID NO: 26920 - DNA, 20 bp, Artificial Sequence
  Description of Artificial Sequence: Synthetic oligonucleotide
  Target: PCSK9; (+) strand; PAM type: YTN; PAM sequence: CTC
tgccttgtcctctcagtttc

SEQ ID NO: 26921 - DNA, 20 bp, Artificial Sequence
  Description of Artificial Sequence: Synthetic oligonucleotide
  Target: PCSK9; (+) strand; PAM type: YTN; PAM sequence: CTG
ccttgtcctctcagtttccc

SEQ ID NO: 26922 - DNA, 20 bp, Artificial Sequence
  Description of Artificial Sequence: Synthetic oligonucleotide
  Target: PCSK9; (+) strand; PAM type: YTN; PAM sequence: CTT
gtcctctcagtttccccccg

SEQ ID NO: 26923 - DNA, 20 bp, Artificial Sequence
  Description of Artificial Sequence: Synthetic oligonucleotide
  Target: PCSK9; (+) strand; PAM type: YTN; PAM sequence: TTG
tcctctcagtttccccccgt

SEQ ID NO: 26924 - DNA, 20 bp, Artificial Sequence
  Description of Artificial Sequence: Synthetic oligonucleotide
  Target: PCSK9; (+) strand; PAM type: YTN; PAM sequence: CTC
tcagtttccccccgtggcac

SEQ ID NO: 26925 - DNA, 20 bp, Artificial Sequence
  Description of Artificial Sequence: Synthetic oligonucleotide
  Target: PCSK9; (+) strand; PAM type: YTN; PAM sequence: CTC
agtttccccccgtggcactt

SEQ ID NO: 26926 - DNA, 20 bp, Artificial Sequence
  Description of Artificial Sequence: Synthetic oligonucleotide
  Target: PCSK9; (+) strand; PAM type: YTN; PAM sequence: TTT
ccccccgtggcacttagaac

SEQ ID NO: 26927 - DNA, 20 bp, Artificial Sequence
  Description of Artificial Sequence: Synthetic oligonucleotide
  Target: PCSK9; (+) strand; PAM type: YTN; PAM sequence: TTC
cccccgtggcacttagaacc

SEQ ID NO: 26928 - DNA, 20 bp, Artificial Sequence
  Description of Artificial Sequence: Synthetic oligonucleotide
  Target: PCSK9; (+) strand; PAM type: YTN; PAM sequence: CTT
agaaccacttgatacaccga

SEQ ID NO: 26929 - DNA, 20 bp, Artificial Sequence
  Description of Artificial Sequence: Synthetic oligonucleotide
  Target: PCSK9; (+) strand; PAM type: YTN; PAM sequence: TTA
gaaccacttgatacaccgaa

SEQ ID NO: 26930 - DNA, 20 bp, Artificial Sequence
  Description of Artificial Sequence: Synthetic oligonucleotide
  Target: PCSK9; (+) strand; PAM type: YTN; PAM sequence: CTT
gatacaccgaatagtttcct

SEQ ID NO: 26931 - DNA, 20 bp, Artificial Sequence
  Description of Artificial Sequence: Synthetic oligonucleotide
  Target: PCSK9; (+) strand; PAM type: YTN; PAM sequence: TTG
atacaccgaatagtttccta

SEQ ID NO: 26932 - DNA, 20 bp, Artificial Sequence
  Description of Artificial Sequence: Synthetic oligonucleotide
  Target: PCSK9; (+) strand; PAM type: YTN; PAM sequence: TTT
cctatctcccccactaggat

SEQ ID NO: 26933 - DNA, 20 bp, Artificial Sequence
  Description of Artificial Sequence: Synthetic oligonucleotide
  Target: PCSK9; (+) strand; PAM type: YTN; PAM sequence: TTC
ctatctcccccactaggatg

SEQ ID NO: 26934 - DNA, 20 bp, Artificial Sequence
  Description of Artificial Sequence: Synthetic oligonucleotide
  Target: PCSK9; (+) strand; PAM type: YTN; PAM sequence: CTA
tctcccccactaggatgtaa

SEQ ID NO: 26935 - DNA, 20 bp, Artificial Sequence
  Description of Artificial Sequence: Synthetic oligonucleotide
  Target: PCSK9; (+) strand; PAM type: YTN; PAM sequence: CTC
ccccactaggatgtaaactc

SEQ ID NO: 26936 - DNA, 20 bp, Artificial Sequence
  Description of Artificial Sequence: Synthetic oligonucleotide
  Target: PCSK9; (+) strand; PAM type: YTN; PAM sequence: CTA
ggatgtaaactccacagggg

SEQ ID NO: 26937 - DNA, 20 bp, Artificial Sequence
  Description of Artificial Sequence: Synthetic oligonucleotide
  Target: PCSK9; (+) strand; PAM type: YTN; PAM sequence: CTC
cacaggggcattgggaatgc

SEQ ID NO: 26938 - DNA, 20 bp, Artificial Sequence
  Description of Artificial Sequence: Synthetic oligonucleotide
  Target: PCSK9; (+) strand; PAM type: YTN; PAM sequence: TTG
ggaatgctgcctggctatgg

SEQ ID NO: 26939 - DNA, 20 bp, Artificial Sequence
  Description of Artificial Sequence: Synthetic oligonucleotide
  Target: PCSK9; (+) strand; PAM type: YTN; PAM sequence: CTG
cctggctatggtagggacag

SEQ ID NO: 26940 - DNA, 20 bp, Artificial Sequence
  Description of Artificial Sequence: Synthetic oligonucleotide
  Target: PCSK9; (+) strand; PAM type: YTN; PAM sequence: CTG
gctatggtagggacagaggg

SEQ ID NO: 26941 - DNA, 20 bp, Artificial Sequence
  Description of Artificial Sequence: Synthetic oligonucleotide
  Target: PCSK9; (+) strand; PAM type: YTN; PAM sequence: CTA
tggtagggacagaggggagc

SEQ ID NO: 26942 - DNA, 20 bp, Artificial Sequence
  Description of Artificial Sequence: Synthetic oligonucleotide
  Target: PCSK9; (+) strand; PAM type: YTN; PAM sequence: TTC
tgcctgggcagtcagatttt

SEQ ID NO: 26943 - DNA, 20 bp, Artificial Sequence
  Description of Artificial Sequence: Synthetic oligonucleotide
  Target: PCSK9; (+) strand; PAM type: YTN; PAM sequence: CTG
cctgggcagtcagattttcc

SEQ ID NO: 26944 - DNA, 20 bp, Artificial Sequence
  Description of Artificial Sequence: Synthetic oligonucleotide
  Target: PCSK9; (+) strand; PAM type: YTN; PAM sequence: CTG
ggcagtcagattttccttag

SEQ ID NO: 26945 - DNA, 20 bp, Artificial Sequence
  Description of Artificial Sequence: Synthetic oligonucleotide
  Target: PCSK9; (+) strand; PAM type: YTN; PAM sequence: TTT
tccttaggaggggacatttg

SEQ ID NO: 26946 - DNA, 20 bp, Artificial Sequence
  Description of Artificial Sequence: Synthetic oligonucleotide
  Target: PCSK9; (+) strand; PAM type: YTN; PAM sequence: TTT
ccttaggaggggacatttga

SEQ ID NO: 26947 - DNA, 20 bp, Artificial Sequence
  Description of Artificial Sequence: Synthetic oligonucleotide
  Target: PCSK9; (+) strand; PAM type: YTN; PAM sequence: TTC
cttaggaggggacatttgag

SEQ ID NO: 26948 - DNA, 20 bp, Artificial Sequence
  Description of Artificial Sequence: Synthetic oligonucleotide
  Target: PCSK9; (+) strand; PAM type: YTN; PAM sequence: CTT
aggaggggacatttgagtgg

SEQ ID NO: 26949 - DNA, 20 bp, Artificial Sequence
  Description of Artificial Sequence: Synthetic oligonucleotide
  Target: PCSK9; (+) strand; PAM type: YTN; PAM sequence: TTA
ggaggggacatttgagtggg

SEQ ID NO: 26950 - DNA, 20 bp, Artificial Sequence
  Description of Artificial Sequence: Synthetic oligonucleotide
  Target: PCSK9; (+) strand; PAM type: YTN; PAM sequence: TTT
gagtgggacccaaacaggtg

SEQ ID NO: 26951 - DNA, 20 bp, Artificial Sequence
  Description of Artificial Sequence: Synthetic oligonucleotide
  Target: PCSK9; (+) strand; PAM type: YTN; PAM sequence: TTG
agtgggacccaaacaggtgt

SEQ ID NO: 26952 - DNA, 20 bp, Artificial Sequence
  Description of Artificial Sequence: Synthetic oligonucleotide
  Target: PCSK9; (+) strand; PAM type: YTN; PAM sequence: TTG
tccagcccagctggcaaggc

SEQ ID NO: 26953 - DNA, 20 bp, Artificial Sequence
  Description of Artificial Sequence: Synthetic oligonucleotide
  Target: PCSK9; (+) strand; PAM type: YTN; PAM sequence: CTG
gcaaggcctgagtctgcctc

SEQ ID NO: 26954 - DNA, 20 bp, Artificial Sequence
  Description of Artificial Sequence: Synthetic oligonucleotide
  Target: PCSK9; (+) strand; PAM type: YTN; PAM sequence: CTG
agtctgcctctgcaacccct

SEQ ID NO: 26955 - DNA, 20 bp, Artificial Sequence
  Description of Artificial Sequence: Synthetic oligonucleotide
  Target: PCSK9; (+) strand; PAM type: YTN; PAM sequence: CTG
cctctgcaacccctctcttg

SEQ ID NO: 26956 - DNA, 20 bp, Artificial Sequence
  Description of Artificial Sequence: Synthetic oligonucleotide
  Target: PCSK9; (+) strand; PAM type: YTN; PAM sequence: CTC
tgcaacccctctcttgggct

SEQ ID NO: 26957 - DNA, 20 bp, Artificial Sequence
  Description of Artificial Sequence: Synthetic oligonucleotide
  Target: PCSK9; (+) strand; PAM type: YTN; PAM sequence: CTG
caacccctctcttgggctcc

SEQ ID NO: 26958 - DNA, 20 bp, Artificial Sequence
  Description of Artificial Sequence: Synthetic oligonucleotide
  Target: PCSK9; (+) strand; PAM type: YTN; PAM sequence: CTC
tcttgggctcctttctctgc

SEQ ID NO: 26959 - DNA, 20 bp, Artificial Sequence
  Description of Artificial Sequence: Synthetic oligonucleotide
  Target: PCSK9; (+) strand; PAM type: YTN; PAM sequence: CTC
ttgggctcctttctctgcca

SEQ ID NO: 26960 - DNA, 20 bp, Artificial Sequence
  Description of Artificial Sequence: Synthetic oligonucleotide
  Target: PCSK9; (+) strand; PAM type: YTN; PAM sequence: CTT
gggctcctttctctgccacc

SEQ ID NO: 26961 - DNA, 20 bp, Artificial Sequence
  Description of Artificial Sequence: Synthetic oligonucleotide
  Target: PCSK9; (+) strand; PAM type: YTN; PAM sequence: TTG
ggctcctttctctgccaccc

SEQ ID NO: 26962 - DNA, 20 bp, Artificial Sequence
  Description of Artificial Sequence: Synthetic oligonucleotide
  Target: PCSK9; (+) strand; PAM type: YTN; PAM sequence: CTC
ctttctctgccacccacctc

SEQ ID NO: 26963 - DNA, 20 bp, Artificial Sequence
  Description of Artificial Sequence: Synthetic oligonucleotide
  Target: PCSK9; (+) strand; PAM type: YTN; PAM sequence: CTT
tctctgccacccacctcctc

SEQ ID NO: 26964 - DNA, 20 bp, Artificial Sequence
  Description of Artificial Sequence: Synthetic oligonucleotide
  Target: PCSK9; (+) strand; PAM type: YTN; PAM sequence: TTT
ctctgccacccacctcctca

SEQ ID NO: 26965 - DNA, 20 bp, Artificial Sequence
  Description of Artificial Sequence: Synthetic oligonucleotide
  Target: PCSK9; (+) strand; PAM type: YTN; PAM sequence: TTC
tctgccacccacctcctcac

SEQ ID NO: 26966 - DNA, 20 bp, Artificial Sequence
  Description of Artificial Sequence: Synthetic oligonucleotide
  Target: PCSK9; (+) strand; PAM type: YTN; PAM sequence: CTC
tgccacccacctcctcacct

SEQ ID NO: 26967 - DNA, 20 bp, Artificial Sequence
  Description of Artificial Sequence: Synthetic oligonucleotide
  Target: PCSK9; (+) strand; PAM type: YTN; PAM sequence: CTG
ccacccacctcctcaccttt

SEQ ID NO: 26968 - DNA, 20 bp, Artificial Sequence
  Description of Artificial Sequence: Synthetic oligonucleotide
  Target: PCSK9; (+) strand; PAM type: YTN; PAM sequence: CTC
ctcacctttccaggtcatca

SEQ ID NO: 26969 - DNA, 20 bp, Artificial Sequence
  Description of Artificial Sequence: Synthetic oligonucleotide
  Target: PCSK9; (+) strand; PAM type: YTN; PAM sequence: CTC
acctttccaggtcatcacag

SEQ ID NO: 26970 - DNA, 20 bp, Artificial Sequence
  Description of Artificial Sequence: Synthetic oligonucleotide
  Target: PCSK9; (+) strand; PAM type: YTN; PAM sequence: CTT
tccaggtcatcacagttggg

SEQ ID NO: 26971 - DNA, 20 bp, Artificial Sequence
  Description of Artificial Sequence: Synthetic oligonucleotide
  Target: PCSK9; (+) strand; PAM type: YTN; PAM sequence: TTT
ccaggtcatcacagttgggg

SEQ ID NO: 26972 - DNA, 20 bp, Artificial Sequence
  Description of Artificial Sequence: Synthetic oligonucleotide
  Target: PCSK9; (+) strand; PAM type: YTN; PAM sequence: TTC
caggtcatcacagttggggc

SEQ ID NO: 26973 - DNA, 20 bp, Artificial Sequence
  Description of Artificial Sequence: Synthetic oligonucleotide
  Target: PCSK9; (+) strand; PAM type: YTN; PAM sequence: TTG
gggccaccaatgcccaagac

SEQ ID NO: 26974 - DNA, 20 bp, Artificial Sequence
  Description of Artificial Sequence: Synthetic oligonucleotide
  Target: PCSK9; (+) strand; PAM type: YTN; PAM sequence: CTG
gggactttggggaccaactt

SEQ ID NO: 26975 - DNA, 20 bp, Artificial Sequence
  Description of Artificial Sequence: Synthetic oligonucleotide
  Target: PCSK9; (+) strand; PAM type: YTN; PAM sequence: CTT
tggggaccaactttggccgc

SEQ ID NO: 26976 - DNA, 20 bp, Artificial Sequence
  Description of Artificial Sequence: Synthetic oligonucleotide
  Target: PCSK9; (+) strand; PAM type: YTN; PAM sequence: TTT
ggggaccaactttggccgct

SEQ ID NO: 26977 - DNA, 20 bp, Artificial Sequence
  Description of Artificial Sequence: Synthetic oligonucleotide
  Target: PCSK9; (+) strand; PAM type: YTN; PAM sequence: TTG
gggaccaactttggccgctg

SEQ ID NO: 26978 - DNA, 20 bp, Artificial Sequence
  Description of Artificial Sequence: Synthetic oligonucleotide
  Target: PCSK9; (+) strand; PAM type: YTN; PAM sequence: CTT
tggccgctgtgtggacctct

SEQ ID NO: 26979 - DNA, 20 bp, Artificial Sequence
  Description of Artificial Sequence: Synthetic oligonucleotide
  Target: PCSK9; (+) strand; PAM type: YTN; PAM sequence: TTT
ggccgctgtgtggacctctt

SEQ ID NO: 26980 - DNA, 20 bp, Artificial Sequence
  Description of Artificial Sequence: Synthetic oligonucleotide
  Target: PCSK9; (+) strand; PAM type: YTN; PAM sequence: TTG
gccgctgtgtggacctcttt

SEQ ID NO: 26981 - DNA, 20 bp, Artificial Sequence
  Description of Artificial Sequence: Synthetic oligonucleotide
  Target: PCSK9; (+) strand; PAM type: YTN; PAM sequence: CTG
tgtggacctctttgccccag

SEQ ID NO: 26982 - DNA, 20 bp, Artificial Sequence
  Description of Artificial Sequence: Synthetic oligonucleotide
  Target: PCSK9; (+) strand; PAM type: YTN; PAM sequence: CTC
tttgccccaggggaggacat

SEQ ID NO: 26983 - DNA, 20 bp, Artificial Sequence
  Description of Artificial Sequence: Synthetic oligonucleotide
  Target: PCSK9; (+) strand; PAM type: YTN; PAM sequence: CTT
tgccccaggggaggacatca

SEQ ID NO: 26984 - DNA, 20 bp, Artificial Sequence
  Description of Artificial Sequence: Synthetic oligonucleotide
  Target: PCSK9; (+) strand; PAM type: YTN; PAM sequence: TTT
gccccaggggaggacatcat

SEQ ID NO: 26985 - DNA, 20 bp, Artificial Sequence
  Description of Artificial Sequence: Synthetic oligonucleotide
  Target: PCSK9; (+) strand; PAM type: YTN; PAM sequence: TTG
ccccaggggaggacatcatt

SEQ ID NO: 26986 - DNA, 20 bp, Artificial Sequence
  Description of Artificial Sequence: Synthetic oligonucleotide
  Target: PCSK9; (+) strand; PAM type: YTN; PAM sequence: TTG
gtgcctccagcgactgcagc

SEQ ID NO: 26987 - DNA, 20 bp, Artificial Sequence
  Description of Artificial Sequence: Synthetic oligonucleotide
  Target: PCSK9; (+) strand; PAM type: YTN; PAM sequence: CTC
cagcgactgcagcacctgct

SEQ ID NO: 26988 - DNA, 20 bp, Artificial Sequence
  Description of Artificial Sequence: Synthetic oligonucleotide
  Target: PCSK9; (+) strand; PAM type: YTN; PAM sequence: CTG
cagcacctgctttgtgtcac

SEQ ID NO: 26989 - DNA, 20 bp, Artificial Sequence
  Description of Artificial Sequence: Synthetic oligonucleotide
  Target: PCSK9; (+) strand; PAM type: YTN; PAM sequence: CTG
ctttgtgtcacagagtggga

SEQ ID NO: 26990 - DNA, 20 bp, Artificial Sequence
  Description of Artificial Sequence: Synthetic oligonucleotide
  Target: PCSK9; (+) strand; PAM type: YTN; PAM sequence: CTT
tgtgtcacagagtgggacat

SEQ ID NO: 26991 - DNA, 20 bp, Artificial Sequence
  Description of Artificial Sequence: Synthetic oligonucleotide
  Target: PCSK9; (+) strand; PAM type: YTN; PAM sequence: TTT
gtgtcacagagtgggacatc

SEQ ID NO: 26992 - DNA, 20 bp, Artificial Sequence
  Description of Artificial Sequence: Synthetic oligonucleotide
  Target: PCSK9; (+) strand; PAM type: YTN; PAM sequence: TTG
tgtcacagagtgggacatca

SEQ ID NO: 26993 - DNA, 20 bp, Artificial Sequence
  Description of Artificial Sequence: Synthetic oligonucleotide
  Target: PCSK9; (+) strand; PAM type: YTN; PAM sequence: CTG
ctgcccacgtggctggtaag

SEQ ID NO: 26994 - DNA, 20 bp, Artificial Sequence
  Description of Artificial Sequence: Synthetic oligonucleotide
  Target: PCSK9; (+) strand; PAM type: YTN; PAM sequence: CTG
cccacgtggctggtaagtca

SEQ ID NO: 26995 - DNA, 20 bp, Artificial Sequence
  Description of Artificial Sequence: Synthetic oligonucleotide
  Target: PCSK9; (+) strand; PAM type: YTN; PAM sequence: CTG
gtaagtcaccaccccactgc

SEQ ID NO: 26996 - DNA, 20 bp, Artificial Sequence
  Description of Artificial Sequence: Synthetic oligonucleotide
  Target: PCSK9; (+) strand; PAM type: YTN; PAM sequence: CTG
cctcggccaccgtgatgcta

SEQ ID NO: 26997 - DNA, 20 bp, Artificial Sequence
  Description of Artificial Sequence: Synthetic oligonucleotide
  Target: PCSK9; (+) strand; PAM type: YTN; PAM sequence: CTC
ggccaccgtgatgctaacag

SEQ ID NO: 26998 - DNA, 20 bp, Artificial Sequence
  Description of Artificial Sequence: Synthetic oligonucleotide
  Target: PCSK9; (+) strand; PAM type: YTN; PAM sequence: CTA
acagcccctttggcagtcag

SEQ ID NO: 26999 - DNA, 20 bp, Artificial Sequence
  Description of Artificial Sequence: Synthetic oligonucleotide
  Target: PCSK9; (+) strand; PAM type: YTN; PAM sequence: CTT
tggcagtcagggtctgtgcc

SEQ ID NO: 27000 - DNA, 20 bp, Artificial Sequence
  Description of Artificial Sequence: Synthetic oligonucleotide
  Target: PCSK9; (+) strand; PAM type: YTN; PAM sequence: TTT
ggcagtcagggtctgtgccg

SEQ ID NO: 27001 - DNA, 20 bp, Artificial Sequence
  Description of Artificial Sequence: Synthetic oligonucleotide
  Target: PCSK9; (+) strand; PAM type: YTN; PAM sequence: TTG
gcagtcagggtctgtgccgg

SEQ ID NO: 27002 - DNA, 20 bp, Artificial Sequence
  Description of Artificial Sequence: Synthetic oligonucleotide
  Target: PCSK9; (+) strand; PAM type: YTN; PAM sequence: CTG
tgccgggacctccagtgcca

SEQ ID NO: 27003 - DNA, 20 bp, Artificial Sequence
  Description of Artificial Sequence: Synthetic oligonucleotide
  Target: PCSK9; (+) strand; PAM type: YTN; PAM sequence: CTC
cagtgccaggctctgtgcag

SEQ ID NO: 27004 - DNA, 20 bp, Artificial Sequence
  Description of Artificial Sequence: Synthetic oligonucleotide
  Target: PCSK9; (+) strand; PAM type: YTN; PAM sequence: CTC
tgtgcagggggaccagagat

SEQ ID NO: 27005 - DNA, 20 bp, Artificial Sequence
  Description of Artificial Sequence: Synthetic oligonucleotide
  Target: PCSK9; (+) strand; PAM type: YTN; PAM sequence: CTG
tgcagggggaccagagatga

SEQ ID NO: 27006 - DNA, 20 bp, Artificial Sequence
  Description of Artificial Sequence: Synthetic oligonucleotide
  Target: PCSK9; (+) strand; PAM type: YTN; PAM sequence: CTG
atggtgccttcaaggacact

SEQ ID NO: 27007 - DNA, 20 bp, Artificial Sequence
  Description of Artificial Sequence: Synthetic oligonucleotide
  Target: PCSK9; (+) strand; PAM type: YTN; PAM sequence: CTT
caaggacactcagtctgatg

SEQ ID NO: 27008 - DNA, 20 bp, Artificial Sequence
  Description of Artificial Sequence: Synthetic oligonucleotide
  Target: PCSK9; (+) strand; PAM type: YTN; PAM sequence: TTC
aaggacactcagtctgatga

SEQ ID NO: 27009 - DNA, 20 bp, Artificial Sequence
  Description of Artificial Sequence: Synthetic oligonucleotide
  Target: PCSK9; (+) strand; PAM type: YTN; PAM sequence: CTC
agtctgatgagggaggcgag

SEQ ID NO: 27010 - DNA, 20 bp, Artificial Sequence
  Description of Artificial Sequence: Synthetic oligonucleotide
  Target: PCSK9; (+) strand; PAM type: YTN; PAM sequence: CTG
atgagggaggcgagtgcaca

SEQ ID NO: 27011 - DNA, 20 bp, Artificial Sequence
  Description of Artificial Sequence: Synthetic oligonucleotide
  Target: PCSK9; (+) strand; PAM type: YTN; PAM sequence: CTG
tattagagggagcccagagg

SEQ ID NO: 27012 - DNA, 20 bp, Artificial Sequence
  Description of Artificial Sequence: Synthetic oligonucleotide
  Target: PCSK9; (+) strand; PAM type: YTN; PAM sequence: TTA
gagggagcccagaggaggca

SEQ ID NO: 27013 - DNA, 20 bp, Artificial Sequence
  Description of Artificial Sequence: Synthetic oligonucleotide
  Target: PCSK9; (+) strand; PAM type: YTN; PAM sequence: CTG
cccagcccgagggtcagaga

SEQ ID NO: 27014 - DNA, 20 bp, Artificial Sequence
  Description of Artificial Sequence: Synthetic oligonucleotide
  Target: PCSK9; (+) strand; PAM type: YTN; PAM sequence: CTT
ggaggagggacatttgatcg

SEQ ID NO: 27015 - DNA, 20 bp, Artificial Sequence
  Description of Artificial Sequence: Synthetic oligonucleotide
  Target: PCSK9; (+) strand; PAM type: YTN; PAM sequence: TTG
gaggagggacatttgatcgg

SEQ ID NO: 27016 - DNA, 20 bp, Artificial Sequence
  Description of Artificial Sequence: Synthetic oligonucleotide
  Target: PCSK9; (+) strand; PAM type: YTN; PAM sequence: TTT
gatcgggagcttgatggatg

SEQ ID NO: 27017 - DNA, 20 bp, Artificial Sequence
  Description of Artificial Sequence: Synthetic oligonucleotide
  Target: PCSK9; (+) strand; PAM type: YTN; PAM sequence: TTG
atcgggagcttgatggatga

SEQ ID NO: 27018 - DNA, 20 bp, Artificial Sequence
  Description of Artificial Sequence: Synthetic oligonucleotide
  Target: PCSK9; (+) strand; PAM type: YTN; PAM sequence: CTT
gatggatgaataggagttca

SEQ ID NO: 27019 - DNA, 20 bp, Artificial Sequence
  Description of Artificial Sequence: Synthetic oligonucleotide
  Target: PCSK9; (+) strand; PAM type: YTN; PAM sequence: TTG
atggatgaataggagttcac

SEQ ID NO: 27020 - DNA, 20 bp, Artificial Sequence
  Description of Artificial Sequence: Synthetic oligonucleotide
  Target: PCSK9; (+) strand; PAM type: YTN; PAM sequence: TTC
acctggccgataagacagca

SEQ ID NO: 27021 - DNA, 20 bp, Artificial Sequence
  Description of Artificial Sequence: Synthetic oligonucleotide
  Target: PCSK9; (+) strand; PAM type: YTN; PAM sequence: CTG
gccgataagacagcaactac

SEQ ID NO: 27022 - DNA, 20 bp, Artificial Sequence
  Description of Artificial Sequence: Synthetic oligonucleotide
  Target: PCSK9; (+) strand; PAM type: YTN; PAM sequence: CTA
ccaaggcttagaggtgtgag

SEQ ID NO: 27023 - DNA, 20 bp, Artificial Sequence
  Description of Artificial Sequence: Synthetic oligonucleotide
  Target: PCSK9; (+) strand; PAM type: YTN; PAM sequence: CTT
agaggtgtgagaggaggctg

SEQ ID NO: 27024 - DNA, 20 bp, Artificial Sequence
  Description of Artificial Sequence: Synthetic oligonucleotide
  Target: PCSK9; (+) strand; PAM type: YTN; PAM sequence: TTA
gaggtgtgagaggaggctgt

SEQ ID NO: 27025 - DNA, 20 bp, Artificial Sequence
  Description of Artificial Sequence: Synthetic oligonucleotide
  Target: PCSK9; (+) strand; PAM type: YTN; PAM sequence: CTG
tcttacctcactgagtaagg

SEQ ID NO: 27026 - DNA, 20 bp, Artificial Sequence
  Description of Artificial Sequence: Synthetic oligonucleotide
  Target: PCSK9; (+) strand; PAM type: YTN; PAM sequence: CTT
acctcactgagtaaggactg

SEQ ID NO: 27027 - DNA, 20 bp, Artificial Sequence
  Description of Artificial Sequence: Synthetic oligonucleotide
  Target: PCSK9; (+) strand; PAM type: YTN; PAM sequence: TTA
cctcactgagtaaggactgc

SEQ ID NO: 27028 - DNA, 20 bp, Artificial Sequence
  Description of Artificial Sequence: Synthetic oligonucleotide
  Target: PCSK9; (+) strand; PAM type: YTN; PAM sequence: CTC
actgagtaaggactgcaggc

SEQ ID NO: 27029 - DNA, 20 bp, Artificial Sequence
  Description of Artificial Sequence: Synthetic oligonucleotide
  Target: PCSK9; (+) strand; PAM type: YTN; PAM sequence: CTG
agtaaggactgcaggcggct

SEQ ID NO: 27030 - DNA, 20 bp, Artificial Sequence
  Description of Artificial Sequence: Synthetic oligonucleotide
  Target: PCSK9; (+) strand; PAM type: YTN; PAM sequence: CTG
caggcggcttaccttcgaga

SEQ ID NO: 27031 - DNA, 20 bp, Artificial Sequence
  Description of Artificial Sequence: Synthetic oligonucleotide
  Target: PCSK9; (+) strand; PAM type: YTN; PAM sequence: CTT
accttcgagaagagagctta

SEQ ID NO: 27032 - DNA, 20 bp, Artificial Sequence
  Description of Artificial Sequence: Synthetic oligonucleotide
  Target: PCSK9; (+) strand; PAM type: YTN; PAM sequence: TTA
ccttcgagaagagagcttag

SEQ ID NO: 27033 - DNA, 20 bp, Artificial Sequence
  Description of Artificial Sequence: Synthetic oligonucleotide
  Target: PCSK9; (+) strand; PAM type: YTN; PAM sequence: CTT
cgagaagagagcttagtgtc

SEQ ID NO: 27034 - DNA, 20 bp, Artificial Sequence
  Description of Artificial Sequence: Synthetic oligonucleotide
  Target: PCSK9; (+) strand; PAM type: YTN; PAM sequence: TTC
gagaagagagcttagtgtct

SEQ ID NO: 27035 - DNA, 20 bp, Artificial Sequence
  Description of Artificial Sequence: Synthetic oligonucleotide
  Target: PCSK9; (+) strand; PAM type: YTN; PAM sequence: CTT
agtgtctgtgtgcacgtgtg

SEQ ID NO: 27036 - DNA, 20 bp, Artificial Sequence
  Description of Artificial Sequence: Synthetic oligonucleotide
  Target: PCSK9; (+) strand; PAM type: YTN; PAM sequence: TTA
gtgtctgtgtgcacgtgtgt

SEQ ID NO: 27037 - DNA, 20 bp, Artificial Sequence
  Description of Artificial Sequence: Synthetic oligonucleotide
  Target: PCSK9; (+) strand; PAM type: YTN; PAM sequence: CTG
tgtgcacgtgtgtttgtgtg

SEQ ID NO: 27038 - DNA, 20 bp, Artificial Sequence
  Description of Artificial Sequence: Synthetic oligonucleotide
  Target: PCSK9; (+) strand; PAM type: YTN; PAM sequence: TTT
gtgtgtatgtgtgtgcgtgt

SEQ ID NO: 27039 - DNA, 20 bp, Artificial Sequence
  Description of Artificial Sequence: Synthetic oligonucleotide
  Target: PCSK9; (+) strand; PAM type: YTN; PAM sequence: TTG
tgtgtatgtgtgtgcgtgtg

SEQ ID NO: 27040 - DNA, 20 bp, Artificial Sequence
  Description of Artificial Sequence: Synthetic oligonucleotide
  Target: PCSK9; (+) strand; PAM type: YTN; PAM sequence: CTG
gcaggagtcccctgctgggg

SEQ ID NO: 27041 - DNA, 20 bp, Artificial Sequence
  Description of Artificial Sequence: Synthetic oligonucleotide
  Target: PCSK9; (+) strand; PAM type: YTN; PAM sequence: CTG
ctggggcaggagggccgggc

SEQ ID NO: 27042 - DNA, 20 bp, Artificial Sequence
  Description of Artificial Sequence: Synthetic oligonucleotide
  Target: PCSK9; (+) strand; PAM type: YTN; PAM sequence: CTG
gggcaggagggccgggccat

SEQ ID NO: 27043 - DNA, 20 bp, Artificial Sequence
  Description of Artificial Sequence: Synthetic oligonucleotide
  Target: PCSK9; (+) strand; PAM type: YTN; PAM sequence: CTT
tcaccattcacccctgcacc

SEQ ID NO: 27044 - DNA, 20 bp, Artificial Sequence
  Description of Artificial Sequence: Synthetic oligonucleotide
  Target: PCSK9; (+) strand; PAM type: YTN; PAM sequence: TTT
caccattcacccctgcacca

SEQ ID NO: 27045 - DNA, 20 bp, Artificial Sequence
  Description of Artificial Sequence: Synthetic oligonucleotide
  Target: PCSK9; (+) strand; PAM type: YTN; PAM sequence: TTC
accattcacccctgcaccag

SEQ ID NO: 27046 - DNA, 20 bp, Artificial Sequence
  Description of Artificial Sequence: Synthetic oligonucleotide
  Target: PCSK9; (+) strand; PAM type: YTN; PAM sequence: TTC
acccctgcaccaggcattgc

SEQ ID NO: 27047 - DNA, 20 bp, Artificial Sequence
  Description of Artificial Sequence: Synthetic oligonucleotide
  Target: PCSK9; (+) strand; PAM type: YTN; PAM sequence: CTG
caccaggcattgcagccatg

SEQ ID NO: 27048 - DNA, 20 bp, Artificial Sequence
  Description of Artificial Sequence: Synthetic oligonucleotide
  Target: PCSK9; (+) strand; PAM type: YTN; PAM sequence: TTG
cagccatgatgctgtctgcc

SEQ ID NO: 27049 - DNA, 20 bp, Artificial Sequence
  Description of Artificial Sequence: Synthetic oligonucleotide
  Target: PCSK9; (+) strand; PAM type: YTN; PAM sequence: CTG
tctgccgagccggagctcac

SEQ ID NO: 27050 - DNA, 20 bp, Artificial Sequence
  Description of Artificial Sequence: Synthetic oligonucleotide
  Target: PCSK9; (+) strand; PAM type: YTN; PAM sequence: CTG
ccgagccggagctcaccctg

SEQ ID NO: 27051 - DNA, 20 bp, Artificial Sequence
  Description of Artificial Sequence: Synthetic oligonucleotide
  Target: PCSK9; (+) strand; PAM type: YTN; PAM sequence: CTC
accctggccgagttgaggca

SEQ ID NO: 27052 - DNA, 20 bp, Artificial Sequence
  Description of Artificial Sequence: Synthetic oligonucleotide
  Target: PCSK9; (+) strand; PAM type: YTN; PAM sequence: CTG
gccgagttgaggcagagact

SEQ ID NO: 27053 - DNA, 20 bp, Artificial Sequence
  Description of Artificial Sequence: Synthetic oligonucleotide
  Target: PCSK9; (+) strand; PAM type: YTN; PAM sequence: TTG
aggcagagactgatccactt

SEQ ID NO: 27054 - DNA, 20 bp, Artificial Sequence
  Description of Artificial Sequence: Synthetic oligonucleotide
  Target: PCSK9; (+) strand; PAM type: YTN; PAM sequence: CTG
atccacttctctgccaaaga

SEQ ID NO: 27055 - DNA, 20 bp, Artificial Sequence
  Description of Artificial Sequence: Synthetic oligonucleotide
  Target: PCSK9; (+) strand; PAM type: YTN; PAM sequence: CTT
ctctgccaaagatgtcatca

SEQ ID NO: 27056 - DNA, 20 bp, Artificial Sequence
  Description of Artificial Sequence: Synthetic oligonucleotide
  Target: PCSK9; (+) strand; PAM type: YTN; PAM sequence: TTC
tctgccaaagatgtcatcaa

SEQ ID NO: 27057 - DNA, 20 bp, Artificial Sequence
  Description of Artificial Sequence: Synthetic oligonucleotide
  Target: PCSK9; (+) strand; PAM type: YTN; PAM sequence: CTC
tgccaaagatgtcatcaatg

SEQ ID NO: 27058 - DNA, 20 bp, Artificial Sequence
  Description of Artificial Sequence: Synthetic oligonucleotide
  Target: PCSK9; (+) strand; PAM type: YTN; PAM sequence: CTG
ccaaagatgtcatcaatgag

SEQ ID NO: 27059 - DNA, 20 bp, Artificial Sequence
  Description of Artificial Sequence: Synthetic oligonucleotide
  Target: PCSK9; (+) strand; PAM type: YTN; PAM sequence: CTG
gttccctgaggaccagcggg

SEQ ID NO: 27060 - DNA, 20 bp, Artificial Sequence
  Description of Artificial Sequence: Synthetic oligonucleotide
  Target: PCSK9; (+) strand; PAM type: YTN; PAM sequence: TTC
cctgaggaccagcgggtact

SEQ ID NO: 27061 - DNA, 20 bp, Artificial Sequence
  Description of Artificial Sequence: Synthetic oligonucleotide
  Target: PCSK9; (+) strand; PAM type: YTN; PAM sequence: CTG
aggaccagcgggtactgacc

SEQ ID NO: 27062 - DNA, 20 bp, Artificial Sequence
  Description of Artificial Sequence: Synthetic oligonucleotide
  Target: PCSK9; (+) strand; PAM type: YTN; PAM sequence: CTG
acccccaacctggtggccgc

SEQ ID NO: 27063 - DNA, 20 bp, Artificial Sequence
  Description of Artificial Sequence: Synthetic oligonucleotide
  Target: PCSK9; (+) strand; PAM type: YTN; PAM sequence: CTG
gtggccgccctgccccccag

SEQ ID NO: 27064 - DNA, 20 bp, Artificial Sequence
  Description of Artificial Sequence: Synthetic oligonucleotide
  Target: PCSK9; (+) strand; PAM type: YTN; PAM sequence: CTG
ccccccagcacccatggggc

SEQ ID NO: 27065 - DNA, 20 bp, Artificial Sequence
  Description of Artificial Sequence: Synthetic oligonucleotide
  Target: PCSK9; (+) strand; PAM type: YTN; PAM sequence: CTG
gggcttgggaggtctgtgtg

SEQ ID NO: 27066 - DNA, 20 bp, Artificial Sequence
  Description of Artificial Sequence: Synthetic oligonucleotide
  Target: PCSK9; (+) strand; PAM type: YTN; PAM sequence: CTT
gggaggtctgtgtgaccttg

SEQ ID NO: 27067 - DNA, 20 bp, Artificial Sequence
  Description of Artificial Sequence: Synthetic oligonucleotide
  Target: PCSK9; (+) strand; PAM type: YTN; PAM sequence: TTG
ggaggtctgtgtgaccttga

SEQ ID NO: 27068 - DNA, 20 bp, Artificial Sequence
  Description of Artificial Sequence: Synthetic oligonucleotide
  Target: PCSK9; (+) strand; PAM type: YTN; PAM sequence: CTG
tgtgaccttgacagtctctc

SEQ ID NO: 27069 - DNA, 20 bp, Artificial Sequence
  Description of Artificial Sequence: Synthetic oligonucleotide
  Target: PCSK9; (+) strand; PAM type: YTN; PAM sequence: CTT
gacagtctctcccttctccc

SEQ ID NO: 27070 - DNA, 20 bp, Artificial Sequence
  Description of Artificial Sequence: Synthetic oligonucleotide
  Target: PCSK9; (+) strand; PAM type: YTN; PAM sequence: TTG
acagtctctcccttctccct

SEQ ID NO: 27071 - DNA, 20 bp, Artificial Sequence
  Description of Artificial Sequence: Synthetic oligonucleotide
  Target: PCSK9; (+) strand; PAM type: YTN; PAM sequence: CTC
tcccttctcccttgtctgtg

SEQ ID NO: 27072 - DNA, 20 bp, Artificial Sequence
  Description of Artificial Sequence: Synthetic oligonucleotide
  Target: PCSK9; (+) strand; PAM type: YTN; PAM sequence: CTC
ccttctcccttgtctgtgta

SEQ ID NO: 27073 - DNA, 20 bp, Artificial Sequence
  Description of Artificial Sequence: Synthetic oligonucleotide
  Target: PCSK9; (+) strand; PAM type: YTN; PAM sequence: CTT
ctcccttgtctgtgtaagga

SEQ ID NO: 27074 - DNA, 20 bp, Artificial Sequence
  Description of Artificial Sequence: Synthetic oligonucleotide
  Target: PCSK9; (+) strand; PAM type: YTN; PAM sequence: TTC
tcccttgtctgtgtaaggag

SEQ ID NO: 27075 - DNA, 20 bp, Artificial Sequence
  Description of Artificial Sequence: Synthetic oligonucleotide
  Target: PCSK9; (+) strand; PAM type: YTN; PAM sequence: CTC
ccttgtctgtgtaaggagga

SEQ ID NO: 27076 - DNA, 20 bp, Artificial Sequence
  Description of Artificial Sequence: Synthetic oligonucleotide
  Target: PCSK9; (+) strand; PAM type: YTN; PAM sequence: CTT
gtctgtgtaaggaggatgac

SEQ ID NO: 27077 - DNA, 20 bp, Artificial Sequence
  Description of Artificial Sequence: Synthetic oligonucleotide
  Target: PCSK9; (+) strand; PAM type: YTN; PAM sequence: TTG
tctgtgtaaggaggatgacg

SEQ ID NO: 27078 - DNA, 20 bp, Artificial Sequence
  Description of Artificial Sequence: Synthetic oligonucleotide
  Target: PCSK9; (+) strand; PAM type: YTN; PAM sequence: CTG
tgtaaggaggatgacgccac

SEQ ID NO: 27079 - DNA, 20 bp, Artificial Sequence
  Description of Artificial Sequence: Synthetic oligonucleotide
  Target: PCSK9; (+) strand; PAM type: YTN; PAM sequence: CTT
aaataggattaaatgagaat

SEQ ID NO: 27080 - DNA, 20 bp, Artificial Sequence
  Description of Artificial Sequence: Synthetic oligonucleotide
  Target: PCSK9; (+) strand; PAM type: YTN; PAM sequence: TTA
aataggattaaatgagaatg

SEQ ID NO: 27081 - DNA, 20 bp, Artificial Sequence
  Description of Artificial Sequence: Synthetic oligonucleotide
  Target: PCSK9; (+) strand; PAM type: YTN; PAM sequence: TTA
aatgagaatggggctctgaa

SEQ ID NO: 27082 - DNA, 20 bp, Artificial Sequence
  Description of Artificial Sequence: Synthetic oligonucleotide
  Target: PCSK9; (+) strand; PAM type: YTN; PAM sequence: CTC
tgaaagggctgtgcaatatt

SEQ ID NO: 27083 - DNA, 20 bp, Artificial Sequence
  Description of Artificial Sequence: Synthetic oligonucleotide
  Target: PCSK9; (+) strand; PAM type: YTN; PAM sequence: CTG
aaagggctgtgcaatatttt

SEQ ID NO: 27084 - DNA, 20 bp, Artificial Sequence
  Description of Artificial Sequence: Synthetic oligonucleotide
  Target: PCSK9; (+) strand; PAM type: YTN; PAM sequence: CTG
tgcaatattttcataacgtg

SEQ ID NO: 27085 - DNA, 20 bp, Artificial Sequence
  Description of Artificial Sequence: Synthetic oligonucleotide
  Target: PCSK9; (+) strand; PAM type: YTN; PAM sequence: TTT
tcataacgtgtttttataga

SEQ ID NO: 27086 - DNA, 20 bp, Artificial Sequence
  Description of Artificial Sequence: Synthetic oligonucleotide
  Target: PCSK9; (+) strand; PAM type: YTN; PAM sequence: TTT
cataacgtgtttttatagag

SEQ ID NO: 27087 - DNA, 20 bp, Artificial Sequence
  Description of Artificial Sequence: Synthetic oligonucleotide
  Target: PCSK9; (+) strand; PAM type: YTN; PAM sequence: TTC
ataacgtgtttttatagaga

SEQ ID NO: 27088 - DNA, 20 bp, Artificial Sequence
  Description of Artificial Sequence: Synthetic oligonucleotide
  Target: PCSK9; (+) strand; PAM type: YTN; PAM sequence: TTT
ttatagagacagttgagtat

SEQ ID NO: 27089 - DNA, 20 bp, Artificial Sequence
  Description of Artificial Sequence: Synthetic oligonucleotide
  Target: PCSK9; (+) strand; PAM type: YTN; PAM sequence: TTT
tatagagacagttgagtatg

SEQ ID NO: 27090 - DNA, 20 bp, Artificial Sequence
  Description of Artificial Sequence: Synthetic oligonucleotide
  Target: PCSK9; (+) strand; PAM type: YTN; PAM sequence: TTT
atagagacagttgagtatgt

SEQ ID NO: 27091 - DNA, 20 bp, Artificial Sequence
  Description of Artificial Sequence: Synthetic oligonucleotide
  Target: PCSK9; (+) strand; PAM type: YTN; PAM sequence: TTA
tagagacagttgagtatgtt

SEQ ID NO: 27092 - DNA, 20 bp, Artificial Sequence
  Description of Artificial Sequence: Synthetic oligonucleotide
  Target: PCSK9; (+) strand; PAM type: YTN; PAM sequence: TTG
agtatgttctttaagccctc

SEQ ID NO: 27093 - DNA, 20 bp, Artificial Sequence
  Description of Artificial Sequence: Synthetic oligonucleotide
  Target: PCSK9; (+) strand; PAM type: YTN; PAM sequence: TTC
tttaagccctcctctctcct

SEQ ID NO: 27094 - DNA, 20 bp, Artificial Sequence
  Description of Artificial Sequence: Synthetic oligonucleotide
  Target: PCSK9; (+) strand; PAM type: YTN; PAM sequence: CTT
taagccctcctctctcctac

SEQ ID NO: 27095 - DNA, 20 bp, Artificial Sequence
  Description of Artificial Sequence: Synthetic oligonucleotide
  Target: PCSK9; (+) strand; PAM type: YTN; PAM sequence: TTT
aagccctcctctctcctacc

SEQ ID NO: 27096 - DNA, 20 bp, Artificial Sequence
  Description of Artificial Sequence: Synthetic oligonucleotide
  Target: PCSK9; (+) strand; PAM type: YTN; PAM sequence: TTA
agccctcctctctcctacca

SEQ ID NO: 27097 - DNA, 20 bp, Artificial Sequence
  Description of Artificial Sequence: Synthetic oligonucleotide
  Target: PCSK9; (+) strand; PAM type: YTN; PAM sequence: CTC
ctctctcctaccatgaacta

SEQ ID NO: 27098 - DNA, 20 bp, Artificial Sequence
  Description of Artificial Sequence: Synthetic oligonucleotide
  Target: PCSK9; (+) strand; PAM type: YTN; PAM sequence: CTC
tctcctaccatgaactaaag

SEQ ID NO: 27099 - DNA, 20 bp, Artificial Sequence
  Description of Artificial Sequence: Synthetic oligonucleotide
  Target: PCSK9; (+) strand; PAM type: YTN; PAM sequence: CTC
tcctaccatgaactaaagat

SEQ ID NO: 27100 - DNA, 20 bp, Artificial Sequence
  Description of Artificial Sequence: Synthetic oligonucleotide
  Target: PCSK9; (+) strand; PAM type: YTN; PAM sequence: CTC
ctaccatgaactaaagattt

SEQ ID NO: 27101 - DNA, 20 bp, Artificial Sequence
  Description of Artificial Sequence: Synthetic oligonucleotide
  Target: PCSK9; (+) strand; PAM type: YTN; PAM sequence: CTA
ccatgaactaaagatttctg

SEQ ID NO: 27102 - DNA, 20 bp, Artificial Sequence
  Description of Artificial Sequence: Synthetic oligonucleotide
  Target: PCSK9; (+) strand; PAM type: YTN; PAM sequence: CTA
aagatttctgtggaggtccc

SEQ ID NO: 27103 - DNA, 20 bp, Artificial Sequence
  Description of Artificial Sequence: Synthetic oligonucleotide
  Target: PCSK9; (+) strand; PAM type: YTN; PAM sequence: TTT
ctgtggaggtcccctcactc

SEQ ID NO: 27104 - DNA, 20 bp, Artificial Sequence
  Description of Artificial Sequence: Synthetic oligonucleotide
  Target: PCSK9; (+) strand; PAM type: YTN; PAM sequence: TTC
tgtggaggtcccctcactcc

SEQ ID NO: 27105 - DNA, 20 bp, Artificial Sequence
  Description of Artificial Sequence: Synthetic oligonucleotide
  Target: PCSK9; (+) strand; PAM type: YTN; PAM sequence: CTG
tggaggtcccctcactccca

SEQ ID NO: 27106 - DNA, 20 bp, Artificial Sequence
  Description of Artificial Sequence: Synthetic oligonucleotide
  Target: PCSK9; (+) strand; PAM type: YTN; PAM sequence: CTC
actcccagcaccccctcctc

SEQ ID NO: 27107 - DNA, 20 bp, Artificial Sequence
  Description of Artificial Sequence: Synthetic oligonucleotide
  Target: PCSK9; (+) strand; PAM type: YTN; PAM sequence: CTC
ccagcaccccctcctcatcc

SEQ ID NO: 27108 - DNA, 20 bp, Artificial Sequence
  Description of Artificial Sequence: Synthetic oligonucleotide
  Target: PCSK9; (+) strand; PAM type: YTN; PAM sequence: CTC
ctcatcccaggccctttttg

SEQ ID NO: 27109 - DNA, 20 bp, Artificial Sequence
  Description of Artificial Sequence: Synthetic oligonucleotide
  Target: PCSK9; (+) strand; PAM type: YTN; PAM sequence: CTC
atcccaggccctttttgcag

SEQ ID NO: 27110 - DNA, 20 bp, Artificial Sequence
  Description of Artificial Sequence: Synthetic oligonucleotide
  Target: PCSK9; (+) strand; PAM type: YTN; PAM sequence: CTT
tttgcaggttggcagctgtt

SEQ ID NO: 27111 - DNA, 20 bp, Artificial Sequence
  Description of Artificial Sequence: Synthetic oligonucleotide
  Target: PCSK9; (+) strand; PAM type: YTN; PAM sequence: TTT
ttgcaggttggcagctgttt

SEQ ID NO: 27112 - DNA, 20 bp, Artificial Sequence
  Description of Artificial Sequence: Synthetic oligonucleotide
  Target: PCSK9; (+) strand; PAM type: YTN; PAM sequence: TTT
tgcaggttggcagctgtttt

SEQ ID NO: 27113 - DNA, 20 bp, Artificial Sequence
  Description of Artificial Sequence: Synthetic oligonucleotide
  Target: PCSK9; (+) strand; PAM type: YTN; PAM sequence: TTT
gcaggttggcagctgttttg

SEQ ID NO: 27114 - DNA, 20 bp, Artificial Sequence
  Description of Artificial Sequence: Synthetic oligonucleotide
  Target: PCSK9; (+) strand; PAM type: YTN; PAM sequence: TTG
caggttggcagctgttttgc

SEQ ID NO: 27115 - DNA, 20 bp, Artificial Sequence
  Description of Artificial Sequence: Synthetic oligonucleotide
  Target: PCSK9; (+) strand; PAM type: YTN; PAM sequence: TTG
gcagctgttttgcaggactg

SEQ ID NO: 27116 - DNA, 20 bp, Artificial Sequence
  Description of Artificial Sequence: Synthetic oligonucleotide
  Target: PCSK9; (+) strand; PAM type: YTN; PAM sequence: CTG
ttttgcaggactgtatggtc

SEQ ID NO: 27117 - DNA, 20 bp, Artificial Sequence
  Description of Artificial Sequence: Synthetic oligonucleotide
  Target: PCSK9; (+) strand; PAM type: YTN; PAM sequence: TTT
tgcaggactgtatggtcagc

SEQ ID NO: 27118 - DNA, 20 bp, Artificial Sequence
  Description of Artificial Sequence: Synthetic oligonucleotide
  Target: PCSK9; (+) strand; PAM type: YTN; PAM sequence: TTT
gcaggactgtatggtcagca

SEQ ID NO: 27119 - DNA, 20 bp, Artificial Sequence
  Description of Artificial Sequence: Synthetic oligonucleotide
  Target: PCSK9; (+) strand; PAM type: YTN; PAM sequence: TTG
caggactgtatggtcagcac

SEQ ID NO: 27120 - DNA, 20 bp, Artificial Sequence
  Description of Artificial Sequence: Synthetic oligonucleotide
  Target: PCSK9; (+) strand; PAM type: YTN; PAM sequence: CTG
tatggtcagcacactcgggg

SEQ ID NO: 27121 - DNA, 20 bp, Artificial Sequence
  Description of Artificial Sequence: Synthetic oligonucleotide
  Target: PCSK9; (+) strand; PAM type: YTN; PAM sequence: CTC
ggggcctacacggatggcca

SEQ ID NO: 27122 - DNA, 20 bp, Artificial Sequence
  Description of Artificial Sequence: Synthetic oligonucleotide
  Target: PCSK9; (+) strand; PAM type: YTN; PAM sequence: CTA
cacggatggccacagccgtc

SEQ ID NO: 27123 - DNA, 20 bp, Artificial Sequence
  Description of Artificial Sequence: Synthetic oligonucleotide
  Target: PCSK9; (+) strand; PAM type: YTN; PAM sequence: CTG
cgccccagatgaggagctgc

SEQ ID NO: 27124 - DNA, 20 bp, Artificial Sequence
  Description of Artificial Sequence: Synthetic oligonucleotide
  Target: PCSK9; (+) strand; PAM type: YTN; PAM sequence: CTG
ctgagctgctccagtttctc

SEQ ID NO: 27125 - DNA, 20 bp, Artificial Sequence
  Description of Artificial Sequence: Synthetic oligonucleotide
  Target: PCSK9; (+) strand; PAM type: YTN; PAM sequence: CTG
agctgctccagtttctccag

SEQ ID NO: 27126 - DNA, 20 bp, Artificial Sequence
  Description of Artificial Sequence: Synthetic oligonucleotide
  Target: PCSK9; (+) strand; PAM type: YTN; PAM sequence: CTG
ctccagtttctccaggagtg

SEQ ID NO: 27127 - DNA, 20 bp, Artificial Sequence
  Description of Artificial Sequence: Synthetic oligonucleotide
  Target: PCSK9; (+) strand; PAM type: YTN; PAM sequence: CTC
cagtttctccaggagtggga

SEQ ID NO: 27128 - DNA, 20 bp, Artificial Sequence
  Description of Artificial Sequence: Synthetic oligonucleotide
  Target: PCSK9; (+) strand; PAM type: YTN; PAM sequence: TTT
ctccaggagtgggaagcggc

SEQ ID NO: 27129 - DNA, 20 bp, Artificial Sequence
  Description of Artificial Sequence: Synthetic oligonucleotide
  Target: PCSK9; (+) strand; PAM type: YTN; PAM sequence: TTC
tccaggagtgggaagcggcg

SEQ ID NO: 27130 - DNA, 20 bp, Artificial Sequence
  Description of Artificial Sequence: Synthetic oligonucleotide
  Target: PCSK9; (+) strand; PAM type: YTN; PAM sequence: CTC
caggagtgggaagcggcggg

SEQ ID NO: 27131 - DNA, 20 bp, Artificial Sequence
  Description of Artificial Sequence: Synthetic oligonucleotide
  Target: PCSK9; (+) strand; PAM type: YTN; PAM sequence: CTG
tacccctccttcgtgtgtgt

SEQ ID NO: 27132 - DNA, 20 bp, Artificial Sequence
  Description of Artificial Sequence: Synthetic oligonucleotide
  Target: PCSK9; (+) strand; PAM type: YTN; PAM sequence: CTC
cttcgtgtgtgtgtgtgtgt

SEQ ID NO: 27133 - DNA, 20 bp, Artificial Sequence
  Description of Artificial Sequence: Synthetic oligonucleotide
  Target: PCSK9; (+) strand; PAM type: YTN; PAM sequence: CTT
cgtgtgtgtgtgtgtgtgtg

SEQ ID NO: 27134 - DNA, 20 bp, Artificial Sequence
  Description of Artificial Sequence: Synthetic oligonucleotide
  Target: PCSK9; (+) strand; PAM type: YTN; PAM sequence: TTC
gtgtgtgtgtgtgtgtgtgt

SEQ ID NO: 27135 - DNA, 20 bp, Artificial Sequence
  Description of Artificial Sequence: Synthetic oligonucleotide
  Target: PCSK9; (+) strand; PAM type: YTN; PAM sequence: CTG
ggccctcagggacccccagc

SEQ ID NO: 27136 - DNA, 20 bp, Artificial Sequence
  Description of Artificial Sequence: Synthetic oligonucleotide
  Target: PCSK9; (+) strand; PAM type: YTN; PAM sequence: CTC
agggacccccagcaagcccc

SEQ ID NO: 27137 - DNA, 20 bp, Artificial Sequence
  Description of Artificial Sequence: Synthetic oligonucleotide
  Target: PCSK9; (+) strand; PAM type: YTN; PAM sequence: CTC
catcctccagactccagctc

SEQ ID NO: 27138 - DNA, 20 bp, Artificial Sequence
  Description of Artificial Sequence: Synthetic oligonucleotide
  Target: PCSK9; (+) strand; PAM type: YTN; PAM sequence: CTC
cagactccagctcttctgta

SEQ ID NO: 27139 - DNA, 20 bp, Artificial Sequence
  Description of Artificial Sequence: Synthetic oligonucleotide
  Target: PCSK9; (+) strand; PAM type: YTN; PAM sequence: CTC
cagctcttctgtaagcttac

SEQ ID NO: 27140 - DNA, 20 bp, Artificial Sequence
  Description of Artificial Sequence: Synthetic oligonucleotide
  Target: PCSK9; (+) strand; PAM type: YTN; PAM sequence: CTC
ttctgtaagcttacagggct

SEQ ID NO: 27141 - DNA, 20 bp, Artificial Sequence
  Description of Artificial Sequence: Synthetic oligonucleotide
  Target: PCSK9; (+) strand; PAM type: YTN; PAM sequence: CTT
ctgtaagcttacagggctgg

SEQ ID NO: 27142 - DNA, 20 bp, Artificial Sequence
  Description of Artificial Sequence: Synthetic oligonucleotide
  Target: PCSK9; (+) strand; PAM type: YTN; PAM sequence: TTC
tgtaagcttacagggctggc

SEQ ID NO: 27143 - DNA, 20 bp, Artificial Sequence
  Description of Artificial Sequence: Synthetic oligonucleotide
  Target: PCSK9; (+) strand; PAM type: YTN; PAM sequence: CTG
taagcttacagggctggcca

SEQ ID NO: 27144 - DNA, 20 bp, Artificial Sequence
  Description of Artificial Sequence: Synthetic oligonucleotide
  Target: PCSK9; (+) strand; PAM type: YTN; PAM sequence: CTT
acagggctggccagaccagg

SEQ ID NO: 27145 - DNA, 20 bp, Artificial Sequence
  Description of Artificial Sequence: Synthetic oligonucleotide
  Target: PCSK9; (+) strand; PAM type: YTN; PAM sequence: TTA
cagggctggccagaccagga

SEQ ID NO: 27146 - DNA, 20 bp, Artificial Sequence
  Description of Artificial Sequence: Synthetic oligonucleotide
  Target: PCSK9; (+) strand; PAM type: YTN; PAM sequence: CTG
gccagaccaggagtggggca

SEQ ID NO: 27147 - DNA, 20 bp, Artificial Sequence
  Description of Artificial Sequence: Synthetic oligonucleotide
  Target: PCSK9; (+) strand; PAM type: YTN; PAM sequence: CTC
ctcacttcacgcggctgggg

SEQ ID NO: 27148 - DNA, 20 bp, Artificial Sequence
  Description of Artificial Sequence: Synthetic oligonucleotide
  Target: PCSK9; (+) strand; PAM type: YTN; PAM sequence: CTC
acttcacgcggctgggggct

SEQ ID NO: 27149 - DNA, 20 bp, Artificial Sequence
  Description of Artificial Sequence: Synthetic oligonucleotide
  Target: PCSK9; (+) strand; PAM type: YTN; PAM sequence: CTT
cacgcggctgggggctgctg

SEQ ID NO: 27150 - DNA, 20 bp, Artificial Sequence
  Description of Artificial Sequence: Synthetic oligonucleotide
  Target: PCSK9; (+) strand; PAM type: YTN; PAM sequence: TTC
acgcggctgggggctgctgg

SEQ ID NO: 27151 - DNA, 20 bp, Artificial Sequence
  Description of Artificial Sequence: Synthetic oligonucleotide
  Target: PCSK9; (+) strand; PAM type: YTN; PAM sequence: CTG
ggggctgctggagagagcca

SEQ ID NO: 27152 - DNA, 20 bp, Artificial Sequence
  Description of Artificial Sequence: Synthetic oligonucleotide
  Target: PCSK9; (+) strand; PAM type: YTN; PAM sequence: CTG
ctggagagagccacagcggg

SEQ ID NO: 27153 - DNA, 20 bp, Artificial Sequence
  Description of Artificial Sequence: Synthetic oligonucleotide
  Target: PCSK9; (+) strand; PAM type: YTN; PAM sequence: CTG
gagagagccacagcgggaag

SEQ ID NO: 27154 - DNA, 20 bp, Artificial Sequence
  Description of Artificial Sequence: Synthetic oligonucleotide
  Target: PCSK9; (+) strand; PAM type: YTN; PAM sequence: TTT
cctagaggctgcaggacagt

SEQ ID NO: 27155 - DNA, 20 bp, Artificial Sequence
  Description of Artificial Sequence: Synthetic oligonucleotide
  Target: PCSK9; (+) strand; PAM type: YTN; PAM sequence: TTC
ctagaggctgcaggacagtg

SEQ ID NO: 27156 - DNA, 20 bp, Artificial Sequence
  Description of Artificial Sequence: Synthetic oligonucleotide
  Target: PCSK9; (+) strand; PAM type: YTN; PAM sequence: CTA
gaggctgcaggacagtgctg

SEQ ID NO: 27157 - DNA, 20 bp, Artificial Sequence
  Description of Artificial Sequence: Synthetic oligonucleotide
  Target: PCSK9; (+) strand; PAM type: YTN; PAM sequence: CTG
caggacagtgctggatggat

SEQ ID NO: 27158 - DNA, 20 bp, Artificial Sequence
  Description of Artificial Sequence: Synthetic oligonucleotide
  Target: PCSK9; (+) strand; PAM type: YTN; PAM sequence: CTG
gatggattttcaatgctcac

SEQ ID NO: 27159 - DNA, 20 bp, Artificial Sequence
  Description of Artificial Sequence: Synthetic oligonucleotide
  Target: PCSK9; (+) strand; PAM type: YTN; PAM sequence: TTT
tcaatgctcacctgggtgtg

SEQ ID NO: 27160 - DNA, 20 bp, Artificial Sequence
  Description of Artificial Sequence: Synthetic oligonucleotide
  Target: PCSK9; (+) strand; PAM type: YTN; PAM sequence: TTT
caatgctcacctgggtgtga

SEQ ID NO: 27161 - DNA, 20 bp, Artificial Sequence
  Description of Artificial Sequence: Synthetic oligonucleotide
  Target: PCSK9; (+) strand; PAM type: YTN; PAM sequence: TTC
aatgctcacctgggtgtgag

SEQ ID NO: 27162 - DNA, 20 bp, Artificial Sequence
  Description of Artificial Sequence: Synthetic oligonucleotide
  Target: PCSK9; (+) strand; PAM type: YTN; PAM sequence: CTC
acctgggtgtgagcgtgcgg

SEQ ID NO: 27163 - DNA, 20 bp, Artificial Sequence
  Description of Artificial Sequence: Synthetic oligonucleotide
  Target: PCSK9; (+) strand; PAM type: YTN; PAM sequence: CTG
ggtgtgagcgtgcggcaggg

SEQ ID NO: 27164 - DNA, 20 bp, Artificial Sequence
  Description of Artificial Sequence: Synthetic oligonucleotide
  Target: PCSK9; (+) strand; PAM type: YTN; PAM sequence: CTG
ctactctggactcagccatc

SEQ ID NO: 27165 - DNA, 20 bp, Artificial Sequence
  Description of Artificial Sequence: Synthetic oligonucleotide
  Target: PCSK9; (+) strand; PAM type: YTN; PAM sequence: CTA
ctctggactcagccatctct

SEQ ID NO: 27166 - DNA, 20 bp, Artificial Sequence
  Description of Artificial Sequence: Synthetic oligonucleotide
  Target: PCSK9; (+) strand; PAM type: YTN; PAM sequence: CTC
tggactcagccatctctagg

SEQ ID NO: 27167 - DNA, 20 bp, Artificial Sequence
  Description of Artificial Sequence: Synthetic oligonucleotide
  Target: PCSK9; (+) strand; PAM type: YTN; PAM sequence: CTG
gactcagccatctctaggcc

SEQ ID NO: 27168 - DNA, 20 bp, Artificial Sequence
  Description of Artificial Sequence: Synthetic oligonucleotide
  Target: PCSK9; (+) strand; PAM type: YTN; PAM sequence: CTC
agccatctctaggcccctct

SEQ ID NO: 27169 - DNA, 20 bp, Artificial Sequence
  Description of Artificial Sequence: Synthetic oligonucleotide
  Target: PCSK9; (+) strand; PAM type: YTN; PAM sequence: CTC
taggcccctctcactcaggt

SEQ ID NO: 27170 - DNA, 20 bp, Artificial Sequence
  Description of Artificial Sequence: Synthetic oligonucleotide
  Target: PCSK9; (+) strand; PAM type: YTN; PAM sequence: CTA
ggcccctctcactcaggtgc

SEQ ID NO: 27171 - DNA, 20 bp, Artificial Sequence
  Description of Artificial Sequence: Synthetic oligonucleotide
  Target: PCSK9; (+) strand; PAM type: YTN; PAM sequence: CTC
tcactcaggtgctccatggt

SEQ ID NO: 27172 - DNA, 20 bp, Artificial Sequence
  Description of Artificial Sequence: Synthetic oligonucleotide
  Target: PCSK9; (+) strand; PAM type: YTN; PAM sequence: CTC
actcaggtgctccatggttc

SEQ ID NO: 27173 - DNA, 20 bp, Artificial Sequence
  Description of Artificial Sequence: Synthetic oligonucleotide
  Target: PCSK9; (+) strand; PAM type: YTN; PAM sequence: CTC
aggtgctccatggttctggg

SEQ ID NO: 27174 - DNA, 20 bp, Artificial Sequence
  Description of Artificial Sequence: Synthetic oligonucleotide
  Target: PCSK9; (+) strand; PAM type: YTN; PAM sequence: CTC
catggttctgggagctgaga

SEQ ID NO: 27175 - DNA, 20 bp, Artificial Sequence
  Description of Artificial Sequence: Synthetic oligonucleotide
  Target: PCSK9; (+) strand; PAM type: YTN; PAM sequence: TTC
tgggagctgagaaatctcaa

SEQ ID NO: 27176 - DNA, 20 bp, Artificial Sequence
  Description of Artificial Sequence: Synthetic oligonucleotide
  Target: PCSK9; (+) strand; PAM type: YTN; PAM sequence: CTG
ggagctgagaaatctcaaac

SEQ ID NO: 27177 - DNA, 20 bp, Artificial Sequence
  Description of Artificial Sequence: Synthetic oligonucleotide
  Target: PCSK9; (+) strand; PAM type: YTN; PAM sequence: CTG
agaaatctcaaaccagcaaa

SEQ ID NO: 27178 - DNA, 20 bp, Artificial Sequence
  Description of Artificial Sequence: Synthetic oligonucleotide
  Target: PCSK9; (+) strand; PAM type: YTN; PAM sequence: CTC
aaaccagcaaaaaagtggaa

SEQ ID NO: 27179 - DNA, 20 bp, Artificial Sequence
  Description of Artificial Sequence: Synthetic oligonucleotide
  Target: PCSK9; (+) strand; PAM type: YTN; PAM sequence: TTG
atgttgatgctacaggatag

SEQ ID NO: 27180 - DNA, 20 bp, Artificial Sequence
  Description of Artificial Sequence: Synthetic oligonucleotide
  Target: PCSK9; (+) strand; PAM type: YTN; PAM sequence: TTG
atgctacaggatagtgcaca

SEQ ID NO: 27181 - DNA, 20 bp, Artificial Sequence
  Description of Artificial Sequence: Synthetic oligonucleotide
  Target: PCSK9; (+) strand; PAM type: YTN; PAM sequence: CTA
caggatagtgcacagatgcc

SEQ ID NO: 27182 - DNA, 20 bp, Artificial Sequence
  Description of Artificial Sequence: Synthetic oligonucleotide
  Target: PCSK9; (+) strand; PAM type: YTN; PAM sequence: CTG
gttgcagcattttggtggaa

SEQ ID NO: 27183 - DNA, 20 bp, Artificial Sequence
  Description of Artificial Sequence: Synthetic oligonucleotide
  Target: PCSK9; (+) strand; PAM type: YTN; PAM sequence: TTG
cagcattttggtggaagggc

SEQ ID NO: 27184 - DNA, 20 bp, Artificial Sequence
  Description of Artificial Sequence: Synthetic oligonucleotide
  Target: PCSK9; (+) strand; PAM type: YTN; PAM sequence: TTT
tggtggaagggcagtgccca

SEQ ID NO: 27185 - DNA, 20 bp, Artificial Sequence
  Description of Artificial Sequence: Synthetic oligonucleotide
  Target: PCSK9; (+) strand; PAM type: YTN; PAM sequence: TTT
ggtggaagggcagtgcccag

SEQ ID NO: 27186 - DNA, 20 bp, Artificial Sequence
  Description of Artificial Sequence: Synthetic oligonucleotide
  Target: PCSK9; (+) strand; PAM type: YTN; PAM sequence: TTG
gtggaagggcagtgcccagc

SEQ ID NO: 27187 - DNA, 20 bp, Artificial Sequence
  Description of Artificial Sequence: Synthetic oligonucleotide
  Target: PCSK9; (+) strand; PAM type: YTN; PAM sequence: CTA
ggagagtgaggaggggcagg

SEQ ID NO: 27188 - DNA, 20 bp, Artificial Sequence
  Description of Artificial Sequence: Synthetic oligonucleotide
  Target: PCSK9; (+) strand; PAM type: YTN; PAM sequence: TTT
ctggcttgaggagatggggt

SEQ ID NO: 27189 - DNA, 20 bp, Artificial Sequence
  Description of Artificial Sequence: Synthetic oligonucleotide
  Target: PCSK9; (+) strand; PAM type: YTN; PAM sequence: TTC
tggcttgaggagatggggtc

SEQ ID NO: 27190 - DNA, 20 bp, Artificial Sequence
  Description of Artificial Sequence: Synthetic oligonucleotide
  Target: PCSK9; (+) strand; PAM type: YTN; PAM sequence: CTG
gcttgaggagatggggtctt

SEQ ID NO: 27191 - DNA, 20 bp, Artificial Sequence
  Description of Artificial Sequence: Synthetic oligonucleotide
  Target: PCSK9; (+) strand; PAM type: YTN; PAM sequence: CTT
gaggagatggggtcttaatg

SEQ ID NO: 27192 - DNA, 20 bp, Artificial Sequence
  Description of Artificial Sequence: Synthetic oligonucleotide
  Target: PCSK9; (+) strand; PAM type: YTN; PAM sequence: TTG
aggagatggggtcttaatgc

SEQ ID NO: 27193 - DNA, 20 bp, Artificial Sequence
  Description of Artificial Sequence: Synthetic oligonucleotide
  Target: PCSK9; (+) strand; PAM type: YTN; PAM sequence: CTT
aatgctcgtgtgagaggcag

SEQ ID NO: 27194 - DNA, 20 bp, Artificial Sequence
  Description of Artificial Sequence: Synthetic oligonucleotide
  Target: PCSK9; (+) strand; PAM type: YTN; PAM sequence: TTA
atgctcgtgtgagaggcaga

SEQ ID NO: 27195 - DNA, 20 bp, Artificial Sequence
  Description of Artificial Sequence: Synthetic oligonucleotide
  Target: PCSK9; (+) strand; PAM type: YTN; PAM sequence: CTC
gtgtgagaggcagagtgggt

SEQ ID NO: 27196 - DNA, 20 bp, Artificial Sequence
  Description of Artificial Sequence: Synthetic oligonucleotide
  Target: PCSK9; (+) strand; PAM type: YTN; PAM sequence: CTG
gctggatccttgctttggcc

SEQ ID NO: 27197 - DNA, 20 bp, Artificial Sequence
  Description of Artificial Sequence: Synthetic oligonucleotide
  Target: PCSK9; (+) strand; PAM type: YTN; PAM sequence: CTG
gatccttgctttggcctcct

SEQ ID NO: 27198 - DNA, 20 bp, Artificial Sequence
  Description of Artificial Sequence: Synthetic oligonucleotide
  Target: PCSK9; (+) strand; PAM type: YTN; PAM sequence: CTT
gctttggcctcctggatttc

SEQ ID NO: 27199 - DNA, 20 bp, Artificial Sequence
  Description of Artificial Sequence: Synthetic oligonucleotide
  Target: PCSK9; (+) strand; PAM type: YTN; PAM sequence: TTG
ctttggcctcctggatttct

SEQ ID NO: 27200 - DNA, 20 bp, Artificial Sequence
  Description of Artificial Sequence: Synthetic oligonucleotide
  Target: PCSK9; (+) strand; PAM type: YTN; PAM sequence: CTT
tggcctcctggatttctctc

SEQ ID NO: 27201 - DNA, 20 bp, Artificial Sequence
  Description of Artificial Sequence: Synthetic oligonucleotide
  Target: PCSK9; (+) strand; PAM type: YTN; PAM sequence: TTT
ggcctcctggatttctctct

SEQ ID NO: 27202 - DNA, 20 bp, Artificial Sequence
  Description of Artificial Sequence: Synthetic oligonucleotide
  Target: PCSK9; (+) strand; PAM type: YTN; PAM sequence: TTG
gcctcctggatttctctcta

SEQ ID NO: 27203 - DNA, 20 bp, Artificial Sequence
  Description of Artificial Sequence: Synthetic oligonucleotide
  Target: PCSK9; (+) strand; PAM type: YTN; PAM sequence: CTC
ctggatttctctctatctcc

SEQ ID NO: 27204 - DNA, 20 bp, Artificial Sequence
  Description of Artificial Sequence: Synthetic oligonucleotide
  Target: PCSK9; (+) strand; PAM type: YTN; PAM sequence: CTG
gatttctctctatctccatt

SEQ ID NO: 27205 - DNA, 20 bp, Artificial Sequence
  Description of Artificial Sequence: Synthetic oligonucleotide
  Target: PCSK9; (+) strand; PAM type: YTN; PAM sequence: TTT
ctctctatctccattttgaa

SEQ ID NO: 27206 - DNA, 20 bp, Artificial Sequence
  Description of Artificial Sequence: Synthetic oligonucleotide
  Target: PCSK9; (+) strand; PAM type: YTN; PAM sequence: TTC
tctctatctccattttgaaa

SEQ ID NO: 27207 - DNA, 20 bp, Artificial Sequence
  Description of Artificial Sequence: Synthetic oligonucleotide
  Target: PCSK9; (+) strand; PAM type: YTN; PAM sequence: CTC
tctatctccattttgaaacc

SEQ ID NO: 27208 - DNA, 20 bp, Artificial Sequence
  Description of Artificial Sequence: Synthetic oligonucleotide
  Target: PCSK9; (+) strand; PAM type: YTN; PAM sequence: CTC
tatctccattttgaaaccac

SEQ ID NO: 27209 - DNA, 20 bp, Artificial Sequence
  Description of Artificial Sequence: Synthetic oligonucleotide
  Target: PCSK9; (+) strand; PAM type: YTN; PAM sequence: CTA
tctccattttgaaaccactc

SEQ ID NO: 27210 - DNA, 20 bp, Artificial Sequence
  Description of Artificial Sequence: Synthetic oligonucleotide
  Target: PCSK9; (+) strand; PAM type: YTN; PAM sequence: CTC
cattttgaaaccactctgtg

SEQ ID NO: 27211 - DNA, 20 bp, Artificial Sequence
  Description of Artificial Sequence: Synthetic oligonucleotide
  Target: PCSK9; (+) strand; PAM type: YTN; PAM sequence: TTT
tgaaaccactctgtgtttgg

SEQ ID NO: 27212 - DNA, 20 bp, Artificial Sequence
  Description of Artificial Sequence: Synthetic oligonucleotide
  Target: PCSK9; (+) strand; PAM type: YTN; PAM sequence: TTT
gaaaccactctgtgtttgga

SEQ ID NO: 27213 - DNA, 20 bp, Artificial Sequence
  Description of Artificial Sequence: Synthetic oligonucleotide
  Target: PCSK9; (+) strand; PAM type: YTN; PAM sequence: TTG
aaaccactctgtgtttggaa

SEQ ID NO: 27214 - DNA, 20 bp, Artificial Sequence
  Description of Artificial Sequence: Synthetic oligonucleotide
  Target: PCSK9; (+) strand; PAM type: YTN; PAM sequence: CTC
tgtgtttggaagaacttttg

SEQ ID NO: 27215 - DNA, 20 bp, Artificial Sequence
  Description of Artificial Sequence: Synthetic oligonucleotide
  Target: PCSK9; (+) strand; PAM type: YTN; PAM sequence: CTG
tgtttggaagaacttttgag

SEQ ID NO: 27216 - DNA, 20 bp, Artificial Sequence
  Description of Artificial Sequence: Synthetic oligonucleotide
  Target: PCSK9; (+) strand; PAM type: YTN; PAM sequence: TTT
ggaagaacttttgagtattc

SEQ ID NO: 27217 - DNA, 20 bp, Artificial Sequence
  Description of Artificial Sequence: Synthetic oligonucleotide
  Target: PCSK9; (+) strand; PAM type: YTN; PAM sequence: TTG
gaagaacttttgagtattca

SEQ ID NO: 27218 - DNA, 20 bp, Artificial Sequence
  Description of Artificial Sequence: Synthetic oligonucleotide
  Target: PCSK9; (+) strand; PAM type: YTN; PAM sequence: CTT
ttgagtattcagagctgccc

SEQ ID NO: 27219 - DNA, 20 bp, Artificial Sequence
  Description of Artificial Sequence: Synthetic oligonucleotide
  Target: PCSK9; (+) strand; PAM type: YTN; PAM sequence: TTT
tgagtattcagagctgccca

SEQ ID NO: 27220 - DNA, 20 bp, Artificial Sequence
  Description of Artificial Sequence: Synthetic oligonucleotide
  Target: PCSK9; (+) strand; PAM type: YTN; PAM sequence: TTT
gagtattcagagctgcccac

SEQ ID NO: 27221 - DNA, 20 bp, Artificial Sequence
  Description of Artificial Sequence: Synthetic oligonucleotide
  Target: PCSK9; (+) strand; PAM type: YTN; PAM sequence: TTG
agtattcagagctgcccact

SEQ ID NO: 27222 - DNA, 20 bp, Artificial Sequence
  Description of Artificial Sequence: Synthetic oligonucleotide
  Target: PCSK9; (+) strand; PAM type: YTN; PAM sequence: TTC
agagctgcccactggcagaa

SEQ ID NO: 27223 - DNA, 20 bp, Artificial Sequence
  Description of Artificial Sequence: Synthetic oligonucleotide
  Target: PCSK9; (+) strand; PAM type: YTN; PAM sequence: CTG
cccactggcagaacagtctt

SEQ ID NO: 27224 - DNA, 20 bp, Artificial Sequence
  Description of Artificial Sequence: Synthetic oligonucleotide
  Target: PCSK9; (+) strand; PAM type: YTN; PAM sequence: CTG
gcagaacagtcttccttggg

SEQ ID NO: 27225 - DNA, 20 bp, Artificial Sequence
  Description of Artificial Sequence: Synthetic oligonucleotide
  Target: PCSK9; (+) strand; PAM type: YTN; PAM sequence: CTT
ccttgggcaggagtgagctc

SEQ ID NO: 27226 - DNA, 20 bp, Artificial Sequence
  Description of Artificial Sequence: Synthetic oligonucleotide
  Target: PCSK9; (+) strand; PAM type: YTN; PAM sequence: TTC
cttgggcaggagtgagctcc

SEQ ID NO: 27227 - DNA, 20 bp, Artificial Sequence
  Description of Artificial Sequence: Synthetic oligonucleotide
  Target: PCSK9; (+) strand; PAM type: YTN; PAM sequence: CTT
gggcaggagtgagctccttg

SEQ ID NO: 27228 - DNA, 20 bp, Artificial Sequence
  Description of Artificial Sequence: Synthetic oligonucleotide
  Target: PCSK9; (+) strand; PAM type: YTN; PAM sequence: TTG
ggcaggagtgagctccttgt

SEQ ID NO: 27229 - DNA, 20 bp, Artificial Sequence
  Description of Artificial Sequence: Synthetic oligonucleotide
  Target: PCSK9; (+) strand; PAM type: YTN; PAM sequence: CTC
cttgtccccagaaggctggg

SEQ ID NO: 27230 - DNA, 20 bp, Artificial Sequence
  Description of Artificial Sequence: Synthetic oligonucleotide
  Target: PCSK9; (+) strand; PAM type: YTN; PAM sequence: CTT
gtccccagaaggctgggtct

SEQ ID NO: 27231 - DNA, 20 bp, Artificial Sequence
  Description of Artificial Sequence: Synthetic oligonucleotide
  Target: PCSK9; (+) strand; PAM type: YTN; PAM sequence: TTG
tccccagaaggctgggtctg

SEQ ID NO: 27232 - DNA, 20 bp, Artificial Sequence
  Description of Artificial Sequence: Synthetic oligonucleotide
  Target: PCSK9; (+) strand; PAM type: YTN; PAM sequence: CTG
ggtctggctggcccctggca

SEQ ID NO: 27233 - DNA, 20 bp, Artificial Sequence
  Description of Artificial Sequence: Synthetic oligonucleotide
  Target: PCSK9; (+) strand; PAM type: YTN; PAM sequence: CTG
gctggcccctggcagggaca

SEQ ID NO: 27234 - DNA, 20 bp, Artificial Sequence
  Description of Artificial Sequence: Synthetic oligonucleotide
  Target: PCSK9; (+) strand; PAM type: YTN; PAM sequence: CTG
gcccctggcagggacactga

SEQ ID NO: 27235 - DNA, 20 bp, Artificial Sequence
  Description of Artificial Sequence: Synthetic oligonucleotide
  Target: PCSK9; (+) strand; PAM type: YTN; PAM sequence: CTG
gcagggacactgatgagggt

SEQ ID NO: 27236 - DNA, 20 bp, Artificial Sequence
  Description of Artificial Sequence: Synthetic oligonucleotide
  Target: PCSK9; (+) strand; PAM type: YTN; PAM sequence: CTG
atgagggtgcttgagttgat

SEQ ID NO: 27237 - DNA, 20 bp, Artificial Sequence
  Description of Artificial Sequence: Synthetic oligonucleotide
  Target: PCSK9; (+) strand; PAM type: YTN; PAM sequence: CTT
gagttgatcctgtctagtcc

SEQ ID NO: 27238 - DNA, 20 bp, Artificial Sequence
  Description of Artificial Sequence: Synthetic oligonucleotide
  Target: PCSK9; (+) strand; PAM type: YTN; PAM sequence: TTG
agttgatcctgtctagtccc

SEQ ID NO: 27239 - DNA, 20 bp, Artificial Sequence
  Description of Artificial Sequence: Synthetic oligonucleotide
  Target: PCSK9; (+) strand; PAM type: YTN; PAM sequence: TTG
atcctgtctagtccctttct

SEQ ID NO: 27240 - DNA, 20 bp, Artificial Sequence
  Description of Artificial Sequence: Synthetic oligonucleotide
  Target: PCSK9; (+) strand; PAM type: YTN; PAM sequence: CTG
tctagtccctttctgtgttt

SEQ ID NO: 27241 - DNA, 20 bp, Artificial Sequence
  Description of Artificial Sequence: Synthetic oligonucleotide
  Target: PCSK9; (+) strand; PAM type: YTN; PAM sequence: CTA
gtccctttctgtgttttcaa

SEQ ID NO: 27242 - DNA, 20 bp, Artificial Sequence
  Description of Artificial Sequence: Synthetic oligonucleotide
  Target: PCSK9; (+) strand; PAM type: YTN; PAM sequence: CTT
tctgtgttttcaaagcccat

SEQ ID NO: 27243 - DNA, 20 bp, Artificial Sequence
  Description of Artificial Sequence: Synthetic oligonucleotide
  Target: PCSK9; (+) strand; PAM type: YTN; PAM sequence: TTT
ctgtgttttcaaagcccatt

SEQ ID NO: 27244 - DNA, 20 bp, Artificial Sequence
  Description of Artificial Sequence: Synthetic oligonucleotide
  Target: PCSK9; (+) strand; PAM type: YTN; PAM sequence: TTC
tgtgttttcaaagcccattc

SEQ ID NO: 27245 - DNA, 20 bp, Artificial Sequence
  Description of Artificial Sequence: Synthetic oligonucleotide
  Target: PCSK9; (+) strand; PAM type: YTN; PAM sequence: CTG
tgttttcaaagcccattcta

SEQ ID NO: 27246 - DNA, 20 bp, Artificial Sequence
  Description of Artificial Sequence: Synthetic oligonucleotide
  Target: PCSK9; (+) strand; PAM type: YTN; PAM sequence: TTT
tcaaagcccattctaaagca

SEQ ID NO: 27247 - DNA, 20 bp, Artificial Sequence
  Description of Artificial Sequence: Synthetic oligonucleotide
  Target: PCSK9; (+) strand; PAM type: YTN; PAM sequence: TTT
caaagcccattctaaagcag

SEQ ID NO: 27248 - DNA, 20 bp, Artificial Sequence
  Description of Artificial Sequence: Synthetic oligonucleotide
  Target: PCSK9; (+) strand; PAM type: YTN; PAM sequence: TTC
aaagcccattctaaagcaga

SEQ ID NO: 27249 - DNA, 20 bp, Artificial Sequence
  Description of Artificial Sequence: Synthetic oligonucleotide
  Target: PCSK9; (+) strand; PAM type: YTN; PAM sequence: TTC
taaagcagattcccatttcc

SEQ ID NO: 27250 - DNA, 20 bp, Artificial Sequence
  Description of Artificial Sequence: Synthetic oligonucleotide
  Target: PCSK9; (+) strand; PAM type: YTN; PAM sequence: CTA
aagcagattcccatttccgt

SEQ ID NO: 27251 - DNA, 20 bp, Artificial Sequence
  Description of Artificial Sequence: Synthetic oligonucleotide
  Target: PCSK9; (+) strand; PAM type: YTN; PAM sequence: TTC
ccatttccgtctttgactct

SEQ ID NO: 27252 - DNA, 20 bp, Artificial Sequence
  Description of Artificial Sequence: Synthetic oligonucleotide
  Target: PCSK9; (+) strand; PAM type: YTN; PAM sequence: TTT
ccgtctttgactctaaggcc

SEQ ID NO: 27253 - DNA, 20 bp, Artificial Sequence
  Description of Artificial Sequence: Synthetic oligonucleotide
  Target: PCSK9; (+) strand; PAM type: YTN; PAM sequence: TTC
cgtctttgactctaaggccc

SEQ ID NO: 27254 - DNA, 20 bp, Artificial Sequence
  Description of Artificial Sequence: Synthetic oligonucleotide
  Target: PCSK9; (+) strand; PAM type: YTN; PAM sequence: CTT
tgactctaaggcccaagggg

SEQ ID NO: 27255 - DNA, 20 bp, Artificial Sequence
  Description of Artificial Sequence: Synthetic oligonucleotide
  Target: PCSK9; (+) strand; PAM type: YTN; PAM sequence: TTT
gactctaaggcccaaggggg

SEQ ID NO: 27256 - DNA, 20 bp, Artificial Sequence
  Description of Artificial Sequence: Synthetic oligonucleotide
  Target: PCSK9; (+) strand; PAM type: YTN; PAM sequence: TTG
actctaaggcccaagggggc

SEQ ID NO: 27257 - DNA, 20 bp, Artificial Sequence
  Description of Artificial Sequence: Synthetic oligonucleotide
  Target: PCSK9; (+) strand; PAM type: YTN; PAM sequence: CTC
taaggcccaagggggcaagc

SEQ ID NO: 27258 - DNA, 20 bp, Artificial Sequence
  Description of Artificial Sequence: Synthetic oligonucleotide
  Target: PCSK9; (+) strand; PAM type: YTN; PAM sequence: CTA
aggcccaagggggcaagctg

SEQ ID NO: 27259 - DNA, 20 bp, Artificial Sequence
  Description of Artificial Sequence: Synthetic oligonucleotide
  Target: PCSK9; (+) strand; PAM type: YTN; PAM sequence: CTG
gtctgccgggcccacaacgc

SEQ ID NO: 27260 - DNA, 20 bp, Artificial Sequence
  Description of Artificial Sequence: Synthetic oligonucleotide
  Target: PCSK9; (+) strand; PAM type: YTN; PAM sequence: CTG
ccgggcccacaacgcttttg

SEQ ID NO: 27261 - DNA, 20 bp, Artificial Sequence
  Description of Artificial Sequence: Synthetic oligonucleotide
  Target: PCSK9; (+) strand; PAM type: YTN; PAM sequence: CTT
ttgggggtgagggtgtctac

SEQ ID NO: 27262 - DNA, 20 bp, Artificial Sequence
  Description of Artificial Sequence: Synthetic oligonucleotide
  Target: PCSK9; (+) strand; PAM type: YTN; PAM sequence: TTT
tgggggtgagggtgtctacg

SEQ ID NO: 27263 - DNA, 20 bp, Artificial Sequence
  Description of Artificial Sequence: Synthetic oligonucleotide
  Target: PCSK9; (+) strand; PAM type: YTN; PAM sequence: TTT
gggggtgagggtgtctacgc

SEQ ID NO: 27264 - DNA, 20 bp, Artificial Sequence
  Description of Artificial Sequence: Synthetic oligonucleotide
  Target: PCSK9; (+) strand; PAM type: YTN; PAM sequence: TTG
ggggtgagggtgtctacgcc

SEQ ID NO: 27265 - DNA, 20 bp, Artificial Sequence
  Description of Artificial Sequence: Synthetic oligonucleotide
  Target: PCSK9; (+) strand; PAM type: YTN; PAM sequence: CTA
cgccattgccaggtgctgcc

SEQ ID NO: 27266 - DNA, 20 bp, Artificial Sequence
  Description of Artificial Sequence: Synthetic oligonucleotide
  Target: PCSK9; (+) strand; PAM type: YTN; PAM sequence: TTG
ccaggtgctgcctgctaccc

SEQ ID NO: 27267 - DNA, 20 bp, Artificial Sequence
  Description of Artificial Sequence: Synthetic oligonucleotide
  Target: PCSK9; (+) strand; PAM type: YTN; PAM sequence: CTG
cctgctaccccaggccaact

SEQ ID NO: 27268 - DNA, 20 bp, Artificial Sequence
  Description of Artificial Sequence: Synthetic oligonucleotide
  Target: PCSK9; (+) strand; PAM type: YTN; PAM sequence: CTG
ctaccccaggccaactgcag

SEQ ID NO: 27269 - DNA, 20 bp, Artificial Sequence
  Description of Artificial Sequence: Synthetic oligonucleotide
  Target: PCSK9; (+) strand; PAM type: YTN; PAM sequence: CTA
ccccaggccaactgcagcgt

SEQ ID NO: 27270 - DNA, 20 bp, Artificial Sequence
  Description of Artificial Sequence: Synthetic oligonucleotide
  Target: PCSK9; (+) strand; PAM type: YTN; PAM sequence: CTG
cagcgtccacacagctccac

SEQ ID NO: 27271 - DNA, 20 bp, Artificial Sequence
  Description of Artificial Sequence: Synthetic oligonucleotide
  Target: PCSK9; (+) strand; PAM type: YTN; PAM sequence: CTC
caccagctgaggccagcatg

SEQ ID NO: 27272 - DNA, 20 bp, Artificial Sequence
  Description of Artificial Sequence: Synthetic oligonucleotide
  Target: PCSK9; (+) strand; PAM type: YTN; PAM sequence: CTG
aggccagcatggggacccgt

SEQ ID NO: 27273 - DNA, 20 bp, Artificial Sequence
  Description of Artificial Sequence: Synthetic oligonucleotide
  Target: PCSK9; (+) strand; PAM type: YTN; PAM sequence: CTG
ccaccaacagggccacgtcc

SEQ ID NO: 27274 - DNA, 20 bp, Artificial Sequence
  Description of Artificial Sequence: Synthetic oligonucleotide
  Target: PCSK9; (+) strand; PAM type: YTN; PAM sequence: CTC
acaggtaggaggctgggctt

SEQ ID NO: 27275 - DNA, 20 bp, Artificial Sequence
  Description of Artificial Sequence: Synthetic oligonucleotide
  Target: PCSK9; (+) strand; PAM type: YTN; PAM sequence: CTG
ggcttgccctggggtgagga

SEQ ID NO: 27276 - DNA, 20 bp, Artificial Sequence
  Description of Artificial Sequence: Synthetic oligonucleotide
  Target: PCSK9; (+) strand; PAM type: YTN; PAM sequence: CTT
gccctggggtgaggaggggt

SEQ ID NO: 27277 - DNA, 20 bp, Artificial Sequence
  Description of Artificial Sequence: Synthetic oligonucleotide
  Target: PCSK9; (+) strand; PAM type: YTN; PAM sequence: TTG
ccctggggtgaggaggggtc

SEQ ID NO: 27278 - DNA, 20 bp, Artificial Sequence
  Description of Artificial Sequence: Synthetic oligonucleotide
  Target: PCSK9; (+) strand; PAM type: YTN; PAM sequence: CTG
gggtgaggaggggtctcttt

SEQ ID NO: 27279 - DNA, 20 bp, Artificial Sequence
  Description of Artificial Sequence: Synthetic oligonucleotide
  Target: PCSK9; (+) strand; PAM type: YTN; PAM sequence: CTC
tttctccttatgcacccact

SEQ ID NO: 27280 - DNA, 20 bp, Artificial Sequence
  Description of Artificial Sequence: Synthetic oligonucleotide
  Target: PCSK9; (+) strand; PAM type: YTN; PAM sequence: CTT
tctccttatgcacccactgc

SEQ ID NO: 27281 - DNA, 20 bp, Artificial Sequence
  Description of Artificial Sequence: Synthetic oligonucleotide
  Target: PCSK9; (+) strand; PAM type: YTN; PAM sequence: TTT
ctccttatgcacccactgcc

SEQ ID NO: 27282 - DNA, 20 bp, Artificial Sequence
  Description of Artificial Sequence: Synthetic oligonucleotide
  Target: PCSK9; (+) strand; PAM type: YTN; PAM sequence: TTC
tccttatgcacccactgccc

SEQ ID NO: 27283 - DNA, 20 bp, Artificial Sequence
  Description of Artificial Sequence: Synthetic oligonucleotide
  Target: PCSK9; (+) strand; PAM type: YTN; PAM sequence: CTC
cttatgcacccactgcccgc

SEQ ID NO: 27284 - DNA, 20 bp, Artificial Sequence
  Description of Artificial Sequence: Synthetic oligonucleotide
  Target: PCSK9; (+) strand; PAM type: YTN; PAM sequence: CTT
atgcacccactgcccgcgag

SEQ ID NO: 27285 - DNA, 20 bp, Artificial Sequence
  Description of Artificial Sequence: Synthetic oligonucleotide
  Target: PCSK9; (+) strand; PAM type: YTN; PAM sequence: TTA
tgcacccactgcccgcgagg

SEQ ID NO: 27286 - DNA, 20 bp, Artificial Sequence
  Description of Artificial Sequence: Synthetic oligonucleotide
  Target: PCSK9; (+) strand; PAM type: YTN; PAM sequence: CTG
cccgcgaggcttggtcctca

SEQ ID NO: 27287 - DNA, 20 bp, Artificial Sequence
  Description of Artificial Sequence: Synthetic oligonucleotide
  Target: PCSK9; (+) strand; PAM type: YTN; PAM sequence: CTT
ggtcctcacaagtgtgatcc

SEQ ID NO: 27288 - DNA, 20 bp, Artificial Sequence
  Description of Artificial Sequence: Synthetic oligonucleotide
  Target: PCSK9; (+) strand; PAM type: YTN; PAM sequence: TTG
gtcctcacaagtgtgatcca

SEQ ID NO: 27289 - DNA, 20 bp, Artificial Sequence
  Description of Artificial Sequence: Synthetic oligonucleotide
  Target: PCSK9; (+) strand; PAM type: YTN; PAM sequence: CTC
acaagtgtgatccatgagac

SEQ ID NO: 27290 - DNA, 20 bp, Artificial Sequence
  Description of Artificial Sequence: Synthetic oligonucleotide
  Target: PCSK9; (+) strand; PAM type: YTN; PAM sequence: CTC
aagcctgacttgcagttcca

SEQ ID NO: 27291 - DNA, 20 bp, Artificial Sequence
  Description of Artificial Sequence: Synthetic oligonucleotide
  Target: PCSK9; (+) strand; PAM type: YTN; PAM sequence: CTG
acttgcagttccatactctg

SEQ ID NO: 27292 - DNA, 20 bp, Artificial Sequence
  Description of Artificial Sequence: Synthetic oligonucleotide
  Target: PCSK9; (+) strand; PAM type: YTN; PAM sequence: CTT
gcagttccatactctggttc

SEQ ID NO: 27293 - DNA, 20 bp, Artificial Sequence
  Description of Artificial Sequence: Synthetic oligonucleotide
  Target: PCSK9; (+) strand; PAM type: YTN; PAM sequence: TTG
cagttccatactctggttct

SEQ ID NO: 27294 - DNA, 20 bp, Artificial Sequence
  Description of Artificial Sequence: Synthetic oligonucleotide
  Target: PCSK9; (+) strand; PAM type: YTN; PAM sequence: TTC
catactctggttctgccact

SEQ ID NO: 27295 - DNA, 20 bp, Artificial Sequence
  Description of Artificial Sequence: Synthetic oligonucleotide
  Target: PCSK9; (+) strand; PAM type: YTN; PAM sequence: CTC
tggttctgccacttccatgc

SEQ ID NO: 27296 - DNA, 20 bp, Artificial Sequence
  Description of Artificial Sequence: Synthetic oligonucleotide
  Target: PCSK9; (+) strand; PAM type: YTN; PAM sequence: CTG
gttctgccacttccatgccc

SEQ ID NO: 27297 - DNA, 20 bp, Artificial Sequence
  Description of Artificial Sequence: Synthetic oligonucleotide
  Target: PCSK9; (+) strand; PAM type: YTN; PAM sequence: TTC
tgccacttccatgccctttg

SEQ ID NO: 27298 - DNA, 20 bp, Artificial Sequence
  Description of Artificial Sequence: Synthetic oligonucleotide
  Target: PCSK9; (+) strand; PAM type: YTN; PAM sequence: CTG
ccacttccatgccctttgag

SEQ ID NO: 27299 - DNA, 20 bp, Artificial Sequence
  Description of Artificial Sequence: Synthetic oligonucleotide
  Target: PCSK9; (+) strand; PAM type: YTN; PAM sequence: CTT
ccatgccctttgagcctggg

SEQ ID NO: 27300 - DNA, 20 bp, Artificial Sequence
  Description of Artificial Sequence: Synthetic oligonucleotide
  Target: PCSK9; (+) strand; PAM type: YTN; PAM sequence: TTC
catgccctttgagcctgggc

SEQ ID NO: 27301 - DNA, 20 bp, Artificial Sequence
  Description of Artificial Sequence: Synthetic oligonucleotide
  Target: PCSK9; (+) strand; PAM type: YTN; PAM sequence: CTT
tgagcctgggcaggtgacct

SEQ ID NO: 27302 - DNA, 20 bp, Artificial Sequence
  Description of Artificial Sequence: Synthetic oligonucleotide
  Target: PCSK9; (+) strand; PAM type: YTN; PAM sequence: TTT
gagcctgggcaggtgacctt

SEQ ID NO: 27303 - DNA, 20 bp, Artificial Sequence
  Description of Artificial Sequence: Synthetic oligonucleotide
  Target: PCSK9; (+) strand; PAM type: YTN; PAM sequence: TTG
agcctgggcaggtgacctta

SEQ ID NO: 27304 - DNA, 20 bp, Artificial Sequence
  Description of Artificial Sequence: Synthetic oligonucleotide
  Target: PCSK9; (+) strand; PAM type: YTN; PAM sequence: CTG
ggcaggtgaccttacttctc

SEQ ID NO: 27305 - DNA, 20 bp, Artificial Sequence
  Description of Artificial Sequence: Synthetic oligonucleotide
  Target: PCSK9; (+) strand; PAM type: YTN; PAM sequence: CTT
acttctcctcatctcagctt

SEQ ID NO: 27306 - DNA, 20 bp, Artificial Sequence
  Description of Artificial Sequence: Synthetic oligonucleotide
  Target: PCSK9; (+) strand; PAM type: YTN; PAM sequence: TTA
cttctcctcatctcagcttc

SEQ ID NO: 27307 - DNA, 20 bp, Artificial Sequence
  Description of Artificial Sequence: Synthetic oligonucleotide
  Target: PCSK9; (+) strand; PAM type: YTN; PAM sequence: CTT
ctcctcatctcagcttcctc

SEQ ID NO: 27308 - DNA, 20 bp, Artificial Sequence
  Description of Artificial Sequence: Synthetic oligonucleotide
  Target: PCSK9; (+) strand; PAM type: YTN; PAM sequence: TTC
tcctcatctcagcttcctcc

SEQ ID NO: 27309 - DNA, 20 bp, Artificial Sequence
  Description of Artificial Sequence: Synthetic oligonucleotide
  Target: PCSK9; (+) strand; PAM type: YTN; PAM sequence: CTC
ctcatctcagcttcctcctc

SEQ ID NO: 27310 - DNA, 20 bp, Artificial Sequence
  Description of Artificial Sequence: Synthetic oligonucleotide
  Target: PCSK9; (+) strand; PAM type: YTN; PAM sequence: CTC
atctcagcttcctcctccat

SEQ ID NO: 27311 - DNA, 20 bp, Artificial Sequence
  Description of Artificial Sequence: Synthetic oligonucleotide
  Target: PCSK9; (+) strand; PAM type: YTN; PAM sequence: CTC
agcttcctcctccataagag

SEQ ID NO: 27312 - DNA, 20 bp, Artificial Sequence
  Description of Artificial Sequence: Synthetic oligonucleotide
  Target: PCSK9; (+) strand; PAM type: YTN; PAM sequence: CTT
cctcctccataagagggaaa

SEQ ID NO: 27313 - DNA, 20 bp, Artificial Sequence
  Description of Artificial Sequence: Synthetic oligonucleotide
  Target: PCSK9; (+) strand; PAM type: YTN; PAM sequence: TTC
ctcctccataagagggaaaa

SEQ ID NO: 27314 - DNA, 20 bp, Artificial Sequence
  Description of Artificial Sequence: Synthetic oligonucleotide
  Target: PCSK9; (+) strand; PAM type: YTN; PAM sequence: CTC
ctccataagagggaaaaagg

SEQ ID NO: 27315 - DNA, 20 bp, Artificial Sequence
  Description of Artificial Sequence: Synthetic oligonucleotide
  Target: PCSK9; (+) strand; PAM type: YTN; PAM sequence: CTC
cataagagggaaaaaggtat

SEQ ID NO: 27316 - DNA, 20 bp, Artificial Sequence
  Description of Artificial Sequence: Synthetic oligonucleotide
  Target: PCSK9; (+) strand; PAM type: YTN; PAM sequence: TTA
cctgcctcattgtgttgcaa

SEQ ID NO: 27317 - DNA, 20 bp, Artificial Sequence
  Description of Artificial Sequence: Synthetic oligonucleotide
  Target: PCSK9; (+) strand; PAM type: YTN; PAM sequence: CTG
cctcattgtgttgcaaggag

SEQ ID NO: 27318 - DNA, 20 bp, Artificial Sequence
  Description of Artificial Sequence: Synthetic oligonucleotide
  Target: PCSK9; (+) strand; PAM type: YTN; PAM sequence: CTC
attgtgttgcaaggagatgg

SEQ ID NO: 27319 - DNA, 20 bp, Artificial Sequence
  Description of Artificial Sequence: Synthetic oligonucleotide
  Target: PCSK9; (+) strand; PAM type: YTN; PAM sequence: TTG
tgttgcaaggagatgggcag

SEQ ID NO: 27320 - DNA, 20 bp, Artificial Sequence
  Description of Artificial Sequence: Synthetic oligonucleotide
  Target: PCSK9; (+) strand; PAM type: YTN; PAM sequence: TTG
caaggagatgggcagcatct

SEQ ID NO: 27321 - DNA, 20 bp, Artificial Sequence
  Description of Artificial Sequence: Synthetic oligonucleotide
  Target: PCSK9; (+) strand; PAM type: YTN; PAM sequence: CTA
gggcactggcctggagtatc

SEQ ID NO: 27322 - DNA, 20 bp, Artificial Sequence
  Description of Artificial Sequence: Synthetic oligonucleotide
  Target: PCSK9; (+) strand; PAM type: YTN; PAM sequence: CTG
gcctggagtatcgcaggtgc

SEQ ID NO: 27323 - DNA, 20 bp, Artificial Sequence
  Description of Artificial Sequence: Synthetic oligonucleotide
  Target: PCSK9; (+) strand; PAM type: YTN; PAM sequence: CTG
gagtatcgcaggtgctttgc

SEQ ID NO: 27324 - DNA, 20 bp, Artificial Sequence
  Description of Artificial Sequence: Synthetic oligonucleotide
  Target: PCSK9; (+) strand; PAM type: YTN; PAM sequence: CTT
tgcctaaggtggtgcagtcc

SEQ ID NO: 27325 - DNA, 20 bp, Artificial Sequence
  Description of Artificial Sequence: Synthetic oligonucleotide
  Target: PCSK9; (+) strand; PAM type: YTN; PAM sequence: TTT
gcctaaggtggtgcagtcca

SEQ ID NO: 27326 - DNA, 20 bp, Artificial Sequence
  Description of Artificial Sequence: Synthetic oligonucleotide
  Target: PCSK9; (+) strand; PAM type: YTN; PAM sequence: TTG
cctaaggtggtgcagtccag

SEQ ID NO: 27327 - DNA, 20 bp, Artificial Sequence
  Description of Artificial Sequence: Synthetic oligonucleotide
  Target: PCSK9; (+) strand; PAM type: YTN; PAM sequence: CTA
aggtggtgcagtccaggaga

SEQ ID NO: 27328 - DNA, 20 bp, Artificial Sequence
  Description of Artificial Sequence: Synthetic oligonucleotide
  Target: PCSK9; (+) strand; PAM type: YTN; PAM sequence: CTC
cagagagaggcccccggctg

SEQ ID NO: 27329 - DNA, 20 bp, Artificial Sequence
  Description of Artificial Sequence: Synthetic oligonucleotide
  Target: PCSK9; (+) strand; PAM type: YTN; PAM sequence: CTG
gggctgaaaggagggcagac

SEQ ID NO: 27330 - DNA, 20 bp, Artificial Sequence
  Description of Artificial Sequence: Synthetic oligonucleotide
  Target: PCSK9; (+) strand; PAM type: YTN; PAM sequence: CTG
aaaggagggcagacctcggt

SEQ ID NO: 27331 - DNA, 20 bp, Artificial Sequence
  Description of Artificial Sequence: Synthetic oligonucleotide
  Target: PCSK9; (+) strand; PAM type: YTN; PAM sequence: CTC
ggtttgaatttcaccctgcc

SEQ ID NO: 27332 - DNA, 20 bp, Artificial Sequence
  Description of Artificial Sequence: Synthetic oligonucleotide
  Target: PCSK9; (+) strand; PAM type: YTN; PAM sequence: TTT
gaatttcaccctgccgctct

SEQ ID NO: 27333 - DNA, 20 bp, Artificial Sequence
  Description of Artificial Sequence: Synthetic oligonucleotide
  Target: PCSK9; (+) strand; PAM type: YTN; PAM sequence: TTG
aatttcaccctgccgctcta

SEQ ID NO: 27334 - DNA, 20 bp, Artificial Sequence
  Description of Artificial Sequence: Synthetic oligonucleotide
  Target: PCSK9; (+) strand; PAM type: YTN; PAM sequence: TTT
caccctgccgctctatagct

SEQ ID NO: 27335 - DNA, 20 bp, Artificial Sequence
  Description of Artificial Sequence: Synthetic oligonucleotide
  Target: PCSK9; (+) strand; PAM type: YTN; PAM sequence: TTC
accctgccgctctatagctg

SEQ ID NO: 27336 - DNA, 20 bp, Artificial Sequence
  Description of Artificial Sequence: Synthetic oligonucleotide
  Target: PCSK9; (+) strand; PAM type: YTN; PAM sequence: CTG
ccgctctatagctgtgtgac

SEQ ID NO: 27337 - DNA, 20 bp, Artificial Sequence
  Description of Artificial Sequence: Synthetic oligonucleotide
  Target: PCSK9; (+) strand; PAM type: YTN; PAM sequence: CTC
tatagctgtgtgacttgggc

SEQ ID NO: 27338 - DNA, 20 bp, Artificial Sequence
  Description of Artificial Sequence: Synthetic oligonucleotide
  Target: PCSK9; (+) strand; PAM type: YTN; PAM sequence: CTA
tagctgtgtgacttgggcaa

SEQ ID NO: 27339 - DNA, 20 bp, Artificial Sequence
  Description of Artificial Sequence: Synthetic oligonucleotide
  Target: PCSK9; (+) strand; PAM type: YTN; PAM sequence: CTG
tgtgacttgggcaaattact

SEQ ID NO: 27340 - DNA, 20 bp, Artificial Sequence
  Description of Artificial Sequence: Synthetic oligonucleotide
  Target: PCSK9; (+) strand; PAM type: YTN; PAM sequence: CTT
gggcaaattacttaacatct

SEQ ID NO: 27341 - DNA, 20 bp, Artificial Sequence
  Description of Artificial Sequence: Synthetic oligonucleotide
  Target: PCSK9; (+) strand; PAM type: YTN; PAM sequence: TTG
ggcaaattacttaacatctc

SEQ ID NO: 27342 - DNA, 20 bp, Artificial Sequence
  Description of Artificial Sequence: Synthetic oligonucleotide
  Target: PCSK9; (+) strand; PAM type: YTN; PAM sequence: TTA
cttaacatctctgtatgagg

SEQ ID NO: 27343 - DNA, 20 bp, Artificial Sequence
  Description of Artificial Sequence: Synthetic oligonucleotide
  Target: PCSK9; (+) strand; PAM type: YTN; PAM sequence: CTT
aacatctctgtatgaggaaa

SEQ ID NO: 27344 - DNA, 20 bp, Artificial Sequence
  Description of Artificial Sequence: Synthetic oligonucleotide
  Target: PCSK9; (+) strand; PAM type: YTN; PAM sequence: TTA
acatctctgtatgaggaaat

SEQ ID NO: 27345 - DNA, 20 bp, Artificial Sequence
  Description of Artificial Sequence: Synthetic oligonucleotide
  Target: PCSK9; (+) strand; PAM type: YTN; PAM sequence: CTC
tgtatgaggaaatgatgagt

SEQ ID NO: 27346 - DNA, 20 bp, Artificial Sequence
  Description of Artificial Sequence: Synthetic oligonucleotide
  Target: PCSK9; (+) strand; PAM type: YTN; PAM sequence: CTG
tatgaggaaatgatgagtgc

SEQ ID NO: 27347 - DNA, 20 bp, Artificial Sequence
  Description of Artificial Sequence: Synthetic oligonucleotide
  Target: PCSK9; (+) strand; PAM type: YTN; PAM sequence: CTA
agcacttagcttagtgccgg

SEQ ID NO: 27348 - DNA, 20 bp, Artificial Sequence
  Description of Artificial Sequence: Synthetic oligonucleotide
  Target: PCSK9; (+) strand; PAM type: YTN; PAM sequence: CTT
agcttagtgccgggacaata

SEQ ID NO: 27349 - DNA, 20 bp, Artificial Sequence
  Description of Artificial Sequence: Synthetic oligonucleotide
  Target: PCSK9; (+) strand; PAM type: YTN; PAM sequence: TTA
gcttagtgccgggacaatat

SEQ ID NO: 27350 - DNA, 20 bp, Artificial Sequence
  Description of Artificial Sequence: Synthetic oligonucleotide
  Target: PCSK9; (+) strand; PAM type: YTN; PAM sequence: CTT
agtgccgggacaatataaat

SEQ ID NO: 27351 - DNA, 20 bp, Artificial Sequence
  Description of Artificial Sequence: Synthetic oligonucleotide
  Target: PCSK9; (+) strand; PAM type: YTN; PAM sequence: TTA
gtgccgggacaatataaatt

SEQ ID NO: 27352 - DNA, 20 bp, Artificial Sequence
  Description of Artificial Sequence: Synthetic oligonucleotide
  Target: PCSK9; (+) strand; PAM type: YTN; PAM sequence: TTC
tagctatcgttactattgtt

SEQ ID NO: 27353 - DNA, 20 bp, Artificial Sequence
  Description of Artificial Sequence: Synthetic oligonucleotide
  Target: PCSK9; (+) strand; PAM type: YTN; PAM sequence: CTA
gctatcgttactattgtttt

SEQ ID NO: 27354 - DNA, 20 bp, Artificial Sequence
  Description of Artificial Sequence: Synthetic oligonucleotide
  Target: PCSK9; (+) strand; PAM type: YTN; PAM sequence: CTA
tcgttactattgttttcatc

SEQ ID NO: 27355 - DNA, 20 bp, Artificial Sequence
  Description of Artificial Sequence: Synthetic oligonucleotide
  Target: PCSK9; (+) strand; PAM type: YTN; PAM sequence: TTA
ctattgttttcatcacccgt

SEQ ID NO: 27356 - DNA, 20 bp, Artificial Sequence
  Description of Artificial Sequence: Synthetic oligonucleotide
  Target: PCSK9; (+) strand; PAM type: YTN; PAM sequence: CTA
ttgttttcatcacccgttgc

SEQ ID NO: 27357 - DNA, 20 bp, Artificial Sequence
  Description of Artificial Sequence: Synthetic oligonucleotide
  Target: PCSK9; (+) strand; PAM type: YTN; PAM sequence: TTG
ttttcatcacccgttgcttt

SEQ ID NO: 27358 - DNA, 20 bp, Artificial Sequence
  Description of Artificial Sequence: Synthetic oligonucleotide
  Target: PCSK9; (+) strand; PAM type: YTN; PAM sequence: TTT
tcatcacccgttgctttaaa

SEQ ID NO: 27359 - DNA, 20 bp, Artificial Sequence
  Description of Artificial Sequence: Synthetic oligonucleotide
  Target: PCSK9; (+) strand; PAM type: YTN; PAM sequence: TTT
catcacccgttgctttaaaa

SEQ ID NO: 27360 - DNA, 20 bp, Artificial Sequence
  Description of Artificial Sequence: Synthetic oligonucleotide
  Target: PCSK9; (+) strand; PAM type: YTN; PAM sequence: TTC
atcacccgttgctttaaaat

SEQ ID NO: 27361 - DNA, 20 bp, Artificial Sequence
  Description of Artificial Sequence: Synthetic oligonucleotide
  Target: PCSK9; (+) strand; PAM type: YTN; PAM sequence: TTG
ctttaaaatccagcctctgg

SEQ ID NO: 27362 - DNA, 20 bp, Artificial Sequence
  Description of Artificial Sequence: Synthetic oligonucleotide
  Target: PCSK9; (+) strand; PAM type: YTN; PAM sequence: CTT
taaaatccagcctctggtat

SEQ ID NO: 27363 - DNA, 20 bp, Artificial Sequence
  Description of Artificial Sequence: Synthetic oligonucleotide
  Target: PCSK9; (+) strand; PAM type: YTN; PAM sequence: TTT
aaaatccagcctctggtata

SEQ ID NO: 27364 - DNA, 20 bp, Artificial Sequence
  Description of Artificial Sequence: Synthetic oligonucleotide
  Target: PCSK9; (+) strand; PAM type: YTN; PAM sequence: TTA
aaatccagcctctggtatag

SEQ ID NO: 27365 - DNA, 20 bp, Artificial Sequence
  Description of Artificial Sequence: Synthetic oligonucleotide
  Target: PCSK9; (+) strand; PAM type: YTN; PAM sequence: CTC
tggtataggcaactattgac

SEQ ID NO: 27366 - DNA, 20 bp, Artificial Sequence
  Description of Artificial Sequence: Synthetic oligonucleotide
  Target: PCSK9; (+) strand; PAM type: YTN; PAM sequence: CTG
gtataggcaactattgacgg

SEQ ID NO: 27367 - DNA, 20 bp, Artificial Sequence
  Description of Artificial Sequence: Synthetic oligonucleotide
  Target: PCSK9; (+) strand; PAM type: YTN; PAM sequence: CTA
ttgacgggctaccctgtgtc

SEQ ID NO: 27368 - DNA, 20 bp, Artificial Sequence
  Description of Artificial Sequence: Synthetic oligonucleotide
  Target: PCSK9; (+) strand; PAM type: YTN; PAM sequence: TTG
acgggctaccctgtgtcgaa

SEQ ID NO: 27369 - DNA, 20 bp, Artificial Sequence
  Description of Artificial Sequence: Synthetic oligonucleotide
  Target: PCSK9; (+) strand; PAM type: YTN; PAM sequence: CTA
ccctgtgtcgaaaacatgcc

SEQ ID NO: 27370 - DNA, 20 bp, Artificial Sequence
  Description of Artificial Sequence: Synthetic oligonucleotide
  Target: PCSK9; (+) strand; PAM type: YTN; PAM sequence: CTG
tgtcgaaaacatgcccaggc

SEQ ID NO: 27371 - DNA, 20 bp, Artificial Sequence
  Description of Artificial Sequence: Synthetic oligonucleotide
  Target: PCSK9; (+) strand; PAM type: YTN; PAM sequence: CTC
ttggggcatcaagggatggt

SEQ ID NO: 27372 - DNA, 20 bp, Artificial Sequence
  Description of Artificial Sequence: Synthetic oligonucleotide
  Target: PCSK9; (+) strand; PAM type: YTN; PAM sequence: CTT
ggggcatcaagggatggtgc

SEQ ID NO: 27373 - DNA, 20 bp, Artificial Sequence
  Description of Artificial Sequence: Synthetic oligonucleotide
  Target: PCSK9; (+) strand; PAM type: YTN; PAM sequence: TTG
gggcatcaagggatggtgcc

SEQ ID NO: 27374 - DNA, 20 bp, Artificial Sequence
  Description of Artificial Sequence: Synthetic oligonucleotide
  Target: PCSK9; (+) strand; PAM type: YTN; PAM sequence: CTG
aggctgagctgttctggttg

SEQ ID NO: 27375 - DNA, 20 bp, Artificial Sequence
  Description of Artificial Sequence: Synthetic oligonucleotide
  Target: PCSK9; (+) strand; PAM type: YTN; PAM sequence: CTG
agctgttctggttgggtgga

SEQ ID NO: 27376 - DNA, 20 bp, Artificial Sequence
  Description of Artificial Sequence: Synthetic oligonucleotide
  Target: PCSK9; (+) strand; PAM type: YTN; PAM sequence: CTG
ttctggttgggtggagcatg

SEQ ID NO: 27377 - DNA, 20 bp, Artificial Sequence
  Description of Artificial Sequence: Synthetic oligonucleotide
  Target: PCSK9; (+) strand; PAM type: YTN; PAM sequence: TTC
tggttgggtggagcatgaga

SEQ ID NO: 27378 - DNA, 20 bp, Artificial Sequence
  Description of Artificial Sequence: Synthetic oligonucleotide
  Target: PCSK9; (+) strand; PAM type: YTN; PAM sequence: CTG
gttgggtggagcatgagagg

SEQ ID NO: 27379 - DNA, 20 bp, Artificial Sequence
  Description of Artificial Sequence: Synthetic oligonucleotide
  Target: PCSK9; (+) strand; PAM type: YTN; PAM sequence: TTG
ggtggagcatgagaggtctg

SEQ ID NO: 27380 - DNA, 20 bp, Artificial Sequence
  Description of Artificial Sequence: Synthetic oligonucleotide
  Target: PCSK9; (+) strand; PAM type: YTN; PAM sequence: CTG
ggaagacagtgggactccag

SEQ ID NO: 27381 - DNA, 20 bp, Artificial Sequence
  Description of Artificial Sequence: Synthetic oligonucleotide
  Target: PCSK9; (+) strand; PAM type: YTN; PAM sequence: CTC
cagcctggaataagaggctc

SEQ ID NO: 27382 - DNA, 20 bp, Artificial Sequence
  Description of Artificial Sequence: Synthetic oligonucleotide
  Target: PCSK9; (+) strand; PAM type: YTN; PAM sequence: CTG
gaataagaggctcagagttg

SEQ ID NO: 27383 - DNA, 20 bp, Artificial Sequence
  Description of Artificial Sequence: Synthetic oligonucleotide
  Target: PCSK9; (+) strand; PAM type: YTN; PAM sequence: CTC
agagttgattctcgtctgag

SEQ ID NO: 27384 - DNA, 20 bp, Artificial Sequence
  Description of Artificial Sequence: Synthetic oligonucleotide
  Target: PCSK9; (+) strand; PAM type: YTN; PAM sequence: TTG
attctcgtctgagcacgtcc

SEQ ID NO: 27385 - DNA, 20 bp, Artificial Sequence
  Description of Artificial Sequence: Synthetic oligonucleotide
  Target: PCSK9; (+) strand; PAM type: YTN; PAM sequence: TTC
tcgtctgagcacgtccaggg

SEQ ID NO: 27386 - DNA, 20 bp, Artificial Sequence
  Description of Artificial Sequence: Synthetic oligonucleotide
  Target: PCSK9; (+) strand; PAM type: YTN; PAM sequence: CTC
gtctgagcacgtccagggga

SEQ ID NO: 27387 - DNA, 20 bp, Artificial Sequence
  Description of Artificial Sequence: Synthetic oligonucleotide
  Target: PCSK9; (+) strand; PAM type: YTN; PAM sequence: CTG
agcacgtccaggggaaccac

SEQ ID NO: 27388 - DNA, 20 bp, Artificial Sequence
  Description of Artificial Sequence: Synthetic oligonucleotide
  Target: PCSK9; (+) strand; PAM type: YTN; PAM sequence: CTG
agggtttgggaacaggagag

SEQ ID NO: 27389 - DNA, 20 bp, Artificial Sequence
  Description of Artificial Sequence: Synthetic oligonucleotide
  Target: PCSK9; (+) strand; PAM type: YTN; PAM sequence: TTT
gggaacaggagagtgagggt

SEQ ID NO: 27390 - DNA, 20 bp, Artificial Sequence
  Description of Artificial Sequence: Synthetic oligonucleotide
  Target: PCSK9; (+) strand; PAM type: YTN; PAM sequence: TTG
ggaacaggagagtgagggtg

SEQ ID NO: 27391 - DNA, 20 bp, Artificial Sequence
  Description of Artificial Sequence: Synthetic oligonucleotide
  Target: PCSK9; (+) strand; PAM type: YTN; PAM sequence: CTG
gttctgggcacagcaggctg

SEQ ID NO: 27392 - DNA, 20 bp, Artificial Sequence
  Description of Artificial Sequence: Synthetic oligonucleotide
  Target: PCSK9; (+) strand; PAM type: YTN; PAM sequence: TTC
tgggcacagcaggctggcat

SEQ ID NO: 27393 - DNA, 20 bp, Artificial Sequence
  Description of Artificial Sequence: Synthetic oligonucleotide
  Target: PCSK9; (+) strand; PAM type: YTN; PAM sequence: CTG
ggcacagcaggctggcatgt

SEQ ID NO: 27394 - DNA, 20 bp, Artificial Sequence
  Description of Artificial Sequence: Synthetic oligonucleotide
  Target: PCSK9; (+) strand; PAM type: YTN; PAM sequence: CTG
gcatgtaggatggatgttca

SEQ ID NO: 27395 - DNA, 20 bp, Artificial Sequence
  Description of Artificial Sequence: Synthetic oligonucleotide
  Target: PCSK9; (+) strand; PAM type: YTN; PAM sequence: TTC
aggaaagatgagcatagtca

SEQ ID NO: 27396 - DNA, 20 bp, Artificial Sequence
  Description of Artificial Sequence: Synthetic oligonucleotide
  Target: PCSK9; (+) strand; PAM type: YTN; PAM sequence: CTG
gtgcccttgtccaggggaga

SEQ ID NO: 27397 - DNA, 20 bp, Artificial Sequence
  Description of Artificial Sequence: Synthetic oligonucleotide
  Target: PCSK9; (+) strand; PAM type: YTN; PAM sequence: CTT
gtccaggggagaggctccgt

SEQ ID NO: 27398 - DNA, 20 bp, Artificial Sequence
  Description of Artificial Sequence: Synthetic oligonucleotide
  Target: PCSK9; (+) strand; PAM type: YTN; PAM sequence: TTG
tccaggggagaggctccgtc

SEQ ID NO: 27399 - DNA, 20 bp, Artificial Sequence
  Description of Artificial Sequence: Synthetic oligonucleotide
  Target: PCSK9; (+) strand; PAM type: YTN; PAM sequence: CTC
cgtcaggttcaggggtcctg

SEQ ID NO: 27400 - DNA, 20 bp, Artificial Sequence
  Description of Artificial Sequence: Synthetic oligonucleotide
  Target: PCSK9; (+) strand; PAM type: YTN; PAM sequence: TTC
aggggtcctggcttggaggg

SEQ ID NO: 27401 - DNA, 20 bp, Artificial Sequence
  Description of Artificial Sequence: Synthetic oligonucleotide
  Target: PCSK9; (+) strand; PAM type: YTN; PAM sequence: CTG
gcttggagggaagtccgcca

SEQ ID NO: 27402 - DNA, 20 bp, Artificial Sequence
  Description of Artificial Sequence: Synthetic oligonucleotide
  Target: PCSK9; (+) strand; PAM type: YTN; PAM sequence: CTT
ggagggaagtccgccatgct

SEQ ID NO: 27403 - DNA, 20 bp, Artificial Sequence
  Description of Artificial Sequence: Synthetic oligonucleotide
  Target: PCSK9; (+) strand; PAM type: YTN; PAM sequence: TTG
gagggaagtccgccatgctc

SEQ ID NO: 27404 - DNA, 20 bp, Artificial Sequence
  Description of Artificial Sequence: Synthetic oligonucleotide
  Target: PCSK9; (+) strand; PAM type: YTN; PAM sequence: CTC
taatcacgctcccctttgga

SEQ ID NO: 27405 - DNA, 20 bp, Artificial Sequence
  Description of Artificial Sequence: Synthetic oligonucleotide
  Target: PCSK9; (+) strand; PAM type: YTN; PAM sequence: CTA
atcacgctcccctttggaag

SEQ ID NO: 27406 - DNA, 20 bp, Artificial Sequence
  Description of Artificial Sequence: Synthetic oligonucleotide
  Target: PCSK9; (+) strand; PAM type: YTN; PAM sequence: CTC
ccctttggaagtgctcagcc

SEQ ID NO: 27407 - DNA, 20 bp, Artificial Sequence
  Description of Artificial Sequence: Synthetic oligonucleotide
  Target: PCSK9; (+) strand; PAM type: YTN; PAM sequence: CTT
tggaagtgctcagccgatga

SEQ ID NO: 27408 - DNA, 20 bp, Artificial Sequence
  Description of Artificial Sequence: Synthetic oligonucleotide
  Target: PCSK9; (+) strand; PAM type: YTN; PAM sequence: TTT
ggaagtgctcagccgatgag

SEQ ID NO: 27409 - DNA, 20 bp, Artificial Sequence
  Description of Artificial Sequence: Synthetic oligonucleotide
  Target: PCSK9; (+) strand; PAM type: YTN; PAM sequence: TTG
gaagtgctcagccgatgagc

SEQ ID NO: 27410 - DNA, 20 bp, Artificial Sequence
  Description of Artificial Sequence: Synthetic oligonucleotide
  Target: PCSK9; (+) strand; PAM type: YTN; PAM sequence: CTC
agccgatgagctcacaggca

SEQ ID NO: 27411 - DNA, 20 bp, Artificial Sequence
  Description of Artificial Sequence: Synthetic oligonucleotide
  Target: PCSK9; (+) strand; PAM type: YTN; PAM sequence: CTC
acaggcacatgtcagtttga

SEQ ID NO: 27412 - DNA, 20 bp, Artificial Sequence
  Description of Artificial Sequence: Synthetic oligonucleotide
  Target: PCSK9; (+) strand; PAM type: YTN; PAM sequence: TTT
gaagtcatggaatctgactc

SEQ ID NO: 27413 - DNA, 20 bp, Artificial Sequence
  Description of Artificial Sequence: Synthetic oligonucleotide
  Target: PCSK9; (+) strand; PAM type: YTN; PAM sequence: TTG
aagtcatggaatctgactcc

SEQ ID NO: 27414 - DNA, 20 bp, Artificial Sequence
  Description of Artificial Sequence: Synthetic oligonucleotide
  Target: PCSK9; (+) strand; PAM type: YTN; PAM sequence: CTG
actccatgaagcgcacctca

SEQ ID NO: 27415 - DNA, 20 bp, Artificial Sequence
  Description of Artificial Sequence: Synthetic oligonucleotide
  Target: PCSK9; (+) strand; PAM type: YTN; PAM sequence: CTC
catgaagcgcacctcaaaga

SEQ ID NO: 27416 - DNA, 20 bp, Artificial Sequence
  Description of Artificial Sequence: Synthetic oligonucleotide
  Target: PCSK9; (+) strand; PAM type: YTN; PAM sequence: CTC
aaagagcaccattttgcagc

SEQ ID NO: 27417 - DNA, 20 bp, Artificial Sequence
  Description of Artificial Sequence: Synthetic oligonucleotide
  Target: PCSK9; (+) strand; PAM type: YTN; PAM sequence: TTT
tgcagctaagggaactgcag

SEQ ID NO: 27418 - DNA, 20 bp, Artificial Sequence
  Description of Artificial Sequence: Synthetic oligonucleotide
  Target: PCSK9; (+) strand; PAM type: YTN; PAM sequence: TTT
gcagctaagggaactgcagg

SEQ ID NO: 27419 - DNA, 20 bp, Artificial Sequence
  Description of Artificial Sequence: Synthetic oligonucleotide
  Target: PCSK9; (+) strand; PAM type: YTN; PAM sequence: TTG
cagctaagggaactgcaggc

SEQ ID NO: 27420 - DNA, 20 bp, Artificial Sequence
  Description of Artificial Sequence: Synthetic oligonucleotide
  Target: PCSK9; (+) strand; PAM type: YTN; PAM sequence: CTA
agggaactgcaggctggaca

SEQ ID NO: 27421 - DNA, 20 bp, Artificial Sequence
  Description of Artificial Sequence: Synthetic oligonucleotide
  Target: PCSK9; (+) strand; PAM type: YTN; PAM sequence: CTG
caggctggacatgctgagtg

SEQ ID NO: 27422 - DNA, 20 bp, Artificial Sequence
  Description of Artificial Sequence: Synthetic oligonucleotide
  Target: PCSK9; (+) strand; PAM type: YTN; PAM sequence: CTG
gacatgctgagtggctgccc

SEQ ID NO: 27423 - DNA, 20 bp, Artificial Sequence
  Description of Artificial Sequence: Synthetic oligonucleotide
  Target: PCSK9; (+) strand; PAM type: YTN; PAM sequence: CTG
agtggctgccccgagccctt

SEQ ID NO: 27424 - DNA, 20 bp, Artificial Sequence
  Description of Artificial Sequence: Synthetic oligonucleotide
  Target: PCSK9; (+) strand; PAM type: YTN; PAM sequence: CTG
ccccgagcccttgcagctag

SEQ ID NO: 27425 - DNA, 20 bp, Artificial Sequence
  Description of Artificial Sequence: Synthetic oligonucleotide
  Target: PCSK9; (+) strand; PAM type: YTN; PAM sequence: CTT
gcagctaggacatagagaat

SEQ ID NO: 27426 - DNA, 20 bp, Artificial Sequence
  Description of Artificial Sequence: Synthetic oligonucleotide
  Target: PCSK9; (+) strand; PAM type: YTN; PAM sequence: TTG
cagctaggacatagagaatg

SEQ ID NO: 27427 - DNA, 20 bp, Artificial Sequence
  Description of Artificial Sequence: Synthetic oligonucleotide
  Target: PCSK9; (+) strand; PAM type: YTN; PAM sequence: CTA
ggacatagagaatgctagta

SEQ ID NO: 27428 - DNA, 20 bp, Artificial Sequence
  Description of Artificial Sequence: Synthetic oligonucleotide
  Target: PCSK9; (+) strand; PAM type: YTN; PAM sequence: CTA
gtaaccacaaccctaccatg

SEQ ID NO: 27429 - DNA, 20 bp, Artificial Sequence
  Description of Artificial Sequence: Synthetic oligonucleotide
  Target: PCSK9; (+) strand; PAM type: YTN; PAM sequence: CTA
ccatgttcagagcacatgcc

SEQ ID NO: 27430 - DNA, 20 bp, Artificial Sequence
  Description of Artificial Sequence: Synthetic oligonucleotide
  Target: PCSK9; (+) strand; PAM type: YTN; PAM sequence: TTC
agagcacatgccaggctcca

SEQ ID NO: 27431 - DNA, 20 bp, Artificial Sequence
  Description of Artificial Sequence: Synthetic oligonucleotide
  Target: PCSK9; (+) strand; PAM type: YTN; PAM sequence: CTC
catgctggggcttcgcacgt

SEQ ID NO: 27432 - DNA, 20 bp, Artificial Sequence
  Description of Artificial Sequence: Synthetic oligonucleotide
  Target: PCSK9; (+) strand; PAM type: YTN; PAM sequence: CTG
gggcttcgcacgtgtcatct

SEQ ID NO: 27433 - DNA, 20 bp, Artificial Sequence
  Description of Artificial Sequence: Synthetic oligonucleotide
  Target: PCSK9; (+) strand; PAM type: YTN; PAM sequence: CTT
cgcacgtgtcatcttcacag

SEQ ID NO: 27434 - DNA, 20 bp, Artificial Sequence
  Description of Artificial Sequence: Synthetic oligonucleotide
  Target: PCSK9; (+) strand; PAM type: YTN; PAM sequence: TTC
gcacgtgtcatcttcacagt

SEQ ID NO: 27435 - DNA, 20 bp, Artificial Sequence
  Description of Artificial Sequence: Synthetic oligonucleotide
  Target: PCSK9; (+) strand; PAM type: YTN; PAM sequence: CTT
cacagtgtccctgtgagtag

SEQ ID NO: 27436 - DNA, 20 bp, Artificial Sequence
  Description of Artificial Sequence: Synthetic oligonucleotide
  Target: PCSK9; (+) strand; PAM type: YTN; PAM sequence: TTC
acagtgtccctgtgagtagg

SEQ ID NO: 27437 - DNA, 20 bp, Artificial Sequence
  Description of Artificial Sequence: Synthetic oligonucleotide
  Target: PCSK9; (+) strand; PAM type: YTN; PAM sequence: CTG
tgagtaggtgtggtttctct

SEQ ID NO: 27438 - DNA, 20 bp, Artificial Sequence
  Description of Artificial Sequence: Synthetic oligonucleotide
  Target: PCSK9; (+) strand; PAM type: YTN; PAM sequence: TTT
ctctttccatcttacaaatg

SEQ ID NO: 27439 - DNA, 20 bp, Artificial Sequence
  Description of Artificial Sequence: Synthetic oligonucleotide
  Target: PCSK9; (+) strand; PAM type: YTN; PAM sequence: TTC
tctttccatcttacaaatga

SEQ ID NO: 27440 - DNA, 20 bp, Artificial Sequence
  Description of Artificial Sequence: Synthetic oligonucleotide
  Target: PCSK9; (+) strand; PAM type: YTN; PAM sequence: CTC
tttccatcttacaaatgagt

SEQ ID NO: 27441 - DNA, 20 bp, Artificial Sequence
  Description of Artificial Sequence: Synthetic oligonucleotide
  Target: PCSK9; (+) strand; PAM type: YTN; PAM sequence: CTT
tccatcttacaaatgagtaa

SEQ ID NO: 27442 - DNA, 20 bp, Artificial Sequence
  Description of Artificial Sequence: Synthetic oligonucleotide
  Target: PCSK9; (+) strand; PAM type: YTN; PAM sequence: TTT
ccatcttacaaatgagtaaa

SEQ ID NO: 27443 - DNA, 20 bp, Artificial Sequence
  Description of Artificial Sequence: Synthetic oligonucleotide
  Target: PCSK9; (+) strand; PAM type: YTN; PAM sequence: TTC
catcttacaaatgagtaaac

SEQ ID NO: 27444 - DNA, 20 bp, Artificial Sequence
  Description of Artificial Sequence: Synthetic oligonucleotide
  Target: PCSK9; (+) strand; PAM type: YTN; PAM sequence: CTT
acaaatgagtaaacagagcc

SEQ ID NO: 27445 - DNA, 20 bp, Artificial Sequence
  Description of Artificial Sequence: Synthetic oligonucleotide
  Target: PCSK9; (+) strand; PAM type: YTN; PAM sequence: TTA
caaatgagtaaacagagcct

SEQ ID NO: 27446 - DNA, 20 bp, Artificial Sequence
  Description of Artificial Sequence: Synthetic oligonucleotide
  Target: PCSK9; (+) strand; PAM type: YTN; PAM sequence: CTC
agtgtagctaagtaaccact

SEQ ID NO: 27447 - DNA, 20 bp, Artificial Sequence
  Description of Artificial Sequence: Synthetic oligonucleotide
  Target: PCSK9; (+) strand; PAM type: YTN; PAM sequence: CTA
agtaaccactattttaggtt

SEQ ID NO: 27448 - DNA, 20 bp, Artificial Sequence
  Description of Artificial Sequence: Synthetic oligonucleotide
  Target: PCSK9; (+) strand; PAM type: YTN; PAM sequence: CTA
ttttaggtttcttagccaat

SEQ ID NO: 27449 - DNA, 20 bp, Artificial Sequence
  Description of Artificial Sequence: Synthetic oligonucleotide
  Target: PCSK9; (+) strand; PAM type: YTN; PAM sequence: TTT
taggtttcttagccaatggg

SEQ ID NO: 27450 - DNA, 20 bp, Artificial Sequence
  Description of Artificial Sequence: Synthetic oligonucleotide
  Target: PCSK9; (+) strand; PAM type: YTN; PAM sequence: TTT
aggtttcttagccaatgggt

SEQ ID NO: 27451 - DNA, 20 bp, Artificial Sequence
  Description of Artificial Sequence: Synthetic oligonucleotide
  Target: PCSK9; (+) strand; PAM type: YTN; PAM sequence: TTA
ggtttcttagccaatgggtg

SEQ ID NO: 27452 - DNA, 20 bp, Artificial Sequence
  Description of Artificial Sequence: Synthetic oligonucleotide
  Target: PCSK9; (+) strand; PAM type: YTN; PAM sequence: TTT
cttagccaatgggtgtgtct

SEQ ID NO: 27453 - DNA, 20 bp, Artificial Sequence
  Description of Artificial Sequence: Synthetic oligonucleotide
  Target: PCSK9; (+) strand; PAM type: YTN; PAM sequence: TTC
ttagccaatgggtgtgtctg

SEQ ID NO: 27454 - DNA, 20 bp, Artificial Sequence
  Description of Artificial Sequence: Synthetic oligonucleotide
  Target: PCSK9; (+) strand; PAM type: YTN; PAM sequence: CTT
agccaatgggtgtgtctgac

SEQ ID NO: 27455 - DNA, 20 bp, Artificial Sequence
  Description of Artificial Sequence: Synthetic oligonucleotide
  Target: PCSK9; (+) strand; PAM type: YTN; PAM sequence: TTA
gccaatgggtgtgtctgact

SEQ ID NO: 27456 - DNA, 20 bp, Artificial Sequence
  Description of Artificial Sequence: Synthetic oligonucleotide
  Target: PCSK9; (+) strand; PAM type: YTN; PAM sequence: CTG
actcctaagcccatggaggg

SEQ ID NO: 27457 - DNA, 20 bp, Artificial Sequence
  Description of Artificial Sequence: Synthetic oligonucleotide
  Target: PCSK9; (+) strand; PAM type: YTN; PAM sequence: CTC
ctaagcccatggagggcatt

SEQ ID NO: 27458 - DNA, 20 bp, Artificial Sequence
  Description of Artificial Sequence: Synthetic oligonucleotide
  Target: PCSK9; (+) strand; PAM type: YTN; PAM sequence: CTA
agcccatggagggcattctg

SEQ ID NO: 27459 - DNA, 20 bp, Artificial Sequence
  Description of Artificial Sequence: Synthetic oligonucleotide
  Target: PCSK9; (+) strand; PAM type: YTN; PAM sequence: TTC
tgaggtggttcagacagacc

SEQ ID NO: 27460 - DNA, 20 bp, Artificial Sequence
  Description of Artificial Sequence: Synthetic oligonucleotide
  Target: PCSK9; (+) strand; PAM type: YTN; PAM sequence: CTG
aggtggttcagacagacccc

SEQ ID NO: 27461 - DNA, 20 bp, Artificial Sequence
  Description of Artificial Sequence: Synthetic oligonucleotide
  Target: PCSK9; (+) strand; PAM type: YTN; PAM sequence: TTC
agacagaccccggcttaccc

SEQ ID NO: 27462 - DNA, 20 bp, Artificial Sequence
  Description of Artificial Sequence: Synthetic oligonucleotide
  Target: PCSK9; (+) strand; PAM type: YTN; PAM sequence: CTT
acccttgaacttctgcctgc

SEQ ID NO: 27463 - DNA, 20 bp, Artificial Sequence
  Description of Artificial Sequence: Synthetic oligonucleotide
  Target: PCSK9; (+) strand; PAM type: YTN; PAM sequence: TTA
cccttgaacttctgcctgct

SEQ ID NO: 27464 - DNA, 20 bp, Artificial Sequence
  Description of Artificial Sequence: Synthetic oligonucleotide
  Target: PCSK9; (+) strand; PAM type: YTN; PAM sequence: CTT
gaacttctgcctgctggctg

SEQ ID NO: 27465 - DNA, 20 bp, Artificial Sequence
  Description of Artificial Sequence: Synthetic oligonucleotide
  Target: PCSK9; (+) strand; PAM type: YTN; PAM sequence: TTG
aacttctgcctgctggctgc

SEQ ID NO: 27466 - DNA, 20 bp, Artificial Sequence
  Description of Artificial Sequence: Synthetic oligonucleotide
  Target: PCSK9; (+) strand; PAM type: YTN; PAM sequence: CTT
ctgcctgctggctgcatagg

SEQ ID NO: 27467 - DNA, 20 bp, Artificial Sequence
  Description of Artificial Sequence: Synthetic oligonucleotide
  Target: PCSK9; (+) strand; PAM type: YTN; PAM sequence: TTC
tgcctgctggctgcataggg

SEQ ID NO: 27468 - DNA, 20 bp, Artificial Sequence
  Description of Artificial Sequence: Synthetic oligonucleotide
  Target: PCSK9; (+) strand; PAM type: YTN; PAM sequence: CTG
cctgctggctgcatagggag

SEQ ID NO: 27469 - DNA, 20 bp, Artificial Sequence
  Description of Artificial Sequence: Synthetic oligonucleotide
  Target: PCSK9; (+) strand; PAM type: YTN; PAM sequence: CTG
ctggctgcatagggaggggc

SEQ ID NO: 27470 - DNA, 20 bp, Artificial Sequence
  Description of Artificial Sequence: Synthetic oligonucleotide
  Target: PCSK9; (+) strand; PAM type: YTN; PAM sequence: CTG
gctgcatagggaggggctgg

SEQ ID NO: 27471 - DNA, 20 bp, Artificial Sequence
  Description of Artificial Sequence: Synthetic oligonucleotide
  Target: PCSK9; (+) strand; PAM type: YTN; PAM sequence: CTG
catagggaggggctgggggg

SEQ ID NO: 27472 - DNA, 20 bp, Artificial Sequence
  Description of Artificial Sequence: Synthetic oligonucleotide
  Target: PCSK9; (+) strand; PAM type: YTN; PAM sequence: CTG
gggggagtttgagcatctca

SEQ ID NO: 27473 - DNA, 20 bp, Artificial Sequence
  Description of Artificial Sequence: Synthetic oligonucleotide
  Target: PCSK9; (+) strand; PAM type: YTN; PAM sequence: TTT
gagcatctcaggccatagag

SEQ ID NO: 27474 - DNA, 20 bp, Artificial Sequence
  Description of Artificial Sequence: Synthetic oligonucleotide
  Target: PCSK9; (+) strand; PAM type: YTN; PAM sequence: TTG
agcatctcaggccatagagc

SEQ ID NO: 27475 - DNA, 20 bp, Artificial Sequence
  Description of Artificial Sequence: Synthetic oligonucleotide
  Target: PCSK9; (+) strand; PAM type: YTN; PAM sequence: CTC
aggccatagagcccctgcct

SEQ ID NO: 27476 - DNA, 20 bp, Artificial Sequence
  Description of Artificial Sequence: Synthetic oligonucleotide
  Target: PCSK9; (+) strand; PAM type: YTN; PAM sequence: CTG
cctcactgtctccatctctg

SEQ ID NO: 27477 - DNA, 20 bp, Artificial Sequence
  Description of Artificial Sequence: Synthetic oligonucleotide
  Target: PCSK9; (+) strand; PAM type: YTN; PAM sequence: CTC
actgtctccatctctgggtg

SEQ ID NO: 27478 - DNA, 20 bp, Artificial Sequence
  Description of Artificial Sequence: Synthetic oligonucleotide
  Target: PCSK9; (+) strand; PAM type: YTN; PAM sequence: CTG
tctccatctctgggtggaaa

SEQ ID NO: 27479 - DNA, 20 bp, Artificial Sequence
  Description of Artificial Sequence: Synthetic oligonucleotide
  Target: PCSK9; (+) strand; PAM type: YTN; PAM sequence: CTC
catctctgggtggaaagatg

SEQ ID NO: 27480 - DNA, 20 bp, Artificial Sequence
  Description of Artificial Sequence: Synthetic oligonucleotide
  Target: PCSK9; (+) strand; PAM type: YTN; PAM sequence: CTC
tgggtggaaagatggtgttt

SEQ ID NO: 27481 - DNA, 20 bp, Artificial Sequence
  Description of Artificial Sequence: Synthetic oligonucleotide
  Target: PCSK9; (+) strand; PAM type: YTN; PAM sequence: CTG
ggtggaaagatggtgttttc

SEQ ID NO: 27482 - DNA, 20 bp, Artificial Sequence
  Description of Artificial Sequence: Synthetic oligonucleotide
  Target: PCSK9; (+) strand; PAM type: YTN; PAM sequence: TTT
tccctgagaaactaaggctc

SEQ ID NO: 27483 - DNA, 20 bp, Artificial Sequence
  Description of Artificial Sequence: Synthetic oligonucleotide
  Target: PCSK9; (+) strand; PAM type: YTN; PAM sequence: TTT
ccctgagaaactaaggctca

SEQ ID NO: 27484 - DNA, 20 bp, Artificial Sequence
  Description of Artificial Sequence: Synthetic oligonucleotide
  Target: PCSK9; (+) strand; PAM type: YTN; PAM sequence: TTC
cctgagaaactaaggctcag

SEQ ID NO: 27485 - DNA, 20 bp, Artificial Sequence
  Description of Artificial Sequence: Synthetic oligonucleotide
  Target: PCSK9; (+) strand; PAM type: YTN; PAM sequence: CTG
agaaactaaggctcagagag

SEQ ID NO: 27486 - DNA, 20 bp, Artificial Sequence
  Description of Artificial Sequence: Synthetic oligonucleotide
  Target: PCSK9; (+) strand; PAM type: YTN; PAM sequence: CTA
aggctcagagaggttgaatg

SEQ ID NO: 27487 - DNA, 20 bp, Artificial Sequence
  Description of Artificial Sequence: Synthetic oligonucleotide
  Target: PCSK9; (+) strand; PAM type: YTN; PAM sequence: CTC
agagaggttgaatggctctc

SEQ ID NO: 27488 - DNA, 20 bp, Artificial Sequence
  Description of Artificial Sequence: Synthetic oligonucleotide
  Target: PCSK9; (+) strand; PAM type: YTN; PAM sequence: TTG
aatggctctcccaaggtcac

SEQ ID NO: 27489 - DNA, 20 bp, Artificial Sequence
  Description of Artificial Sequence: Synthetic oligonucleotide
  Target: PCSK9; (+) strand; PAM type: YTN; PAM sequence: CTC
tcccaaggtcacacagctgg

SEQ ID NO: 27490 - DNA, 20 bp, Artificial Sequence
  Description of Artificial Sequence: Synthetic oligonucleotide
  Target: PCSK9; (+) strand; PAM type: YTN; PAM sequence: CTC
ccaaggtcacacagctggtc

SEQ ID NO: 27491 - DNA, 20 bp, Artificial Sequence
  Description of Artificial Sequence: Synthetic oligonucleotide
  Target: PCSK9; (+) strand; PAM type: YTN; PAM sequence: CTG
gtcagctgcagagttgagaa

SEQ ID NO: 27492 - DNA, 20 bp, Artificial Sequence
  Description of Artificial Sequence: Synthetic oligonucleotide
  Target: PCSK9; (+) strand; PAM type: YTN; PAM sequence: CTG
cagagttgagaacacaggag

SEQ ID NO: 27493 - DNA, 20 bp, Artificial Sequence
  Description of Artificial Sequence: Synthetic oligonucleotide
  Target: PCSK9; (+) strand; PAM type: YTN; PAM sequence: TTG
agaacacaggagtcctggtg

SEQ ID NO: 27494 - DNA, 20 bp, Artificial Sequence
  Description of Artificial Sequence: Synthetic oligonucleotide
  Target: PCSK9; (+) strand; PAM type: YTN; PAM sequence: CTG
gtgctcaggccagcatctct

SEQ ID NO: 27495 - DNA, 20 bp, Artificial Sequence
  Description of Artificial Sequence: Synthetic oligonucleotide
  Target: PCSK9; (+) strand; PAM type: YTN; PAM sequence: CTC
aggccagcatctcttttttt

SEQ ID NO: 27496 - DNA, 20 bp, Artificial Sequence
  Description of Artificial Sequence: Synthetic oligonucleotide
  Target: PCSK9; (+) strand; PAM type: YTN; PAM sequence: CTC
tttttttctttgagttgttt

SEQ ID NO: 27497 - DNA, 20 bp, Artificial Sequence
  Description of Artificial Sequence: Synthetic oligonucleotide
  Target: PCSK9; (+) strand; PAM type: YTN; PAM sequence: CTT
tttttctttgagttgtttct

SEQ ID NO: 27498 - DNA, 20 bp, Artificial Sequence
  Description of Artificial Sequence: Synthetic oligonucleotide
  Target: PCSK9; (+) strand; PAM type: YTN; PAM sequence: TTT
ttttctttgagttgtttcta

SEQ ID NO: 27499 - DNA, 20 bp, Artificial Sequence
  Description of Artificial Sequence: Synthetic oligonucleotide
  Target: PCSK9; (+) strand; PAM type: YTN; PAM sequence: TTT
tttctttgagttgtttctag

SEQ ID NO: 27500 - DNA, 20 bp, Artificial Sequence
  Description of Artificial Sequence: Synthetic oligonucleotide
  Target: PCSK9; (+) strand; PAM type: YTN; PAM sequence: TTT
ttctttgagttgtttctagg

SEQ ID NO: 27501 - DNA, 20 bp, Artificial Sequence
  Description of Artificial Sequence: Synthetic oligonucleotide
  Target: PCSK9; (+) strand; PAM type: YTN; PAM sequence: TTT
tctttgagttgtttctaggt

SEQ ID NO: 27502 - DNA, 20 bp, Artificial Sequence
  Description of Artificial Sequence: Synthetic oligonucleotide
  Target: PCSK9; (+) strand; PAM type: YTN; PAM sequence: TTT
ctttgagttgtttctaggtt

SEQ ID NO: 27503 - DNA, 20 bp, Artificial Sequence
  Description of Artificial Sequence: Synthetic oligonucleotide
  Target: PCSK9; (+) strand; PAM type: YTN; PAM sequence: TTC
tttgagttgtttctaggttt

SEQ ID NO: 27504 - DNA, 20 bp, Artificial Sequence
  Description of Artificial Sequence: Synthetic oligonucleotide
  Target: PCSK9; (+) strand; PAM type: YTN; PAM sequence: CTT
tgagttgtttctaggtttcc

SEQ ID NO: 27505 - DNA, 20 bp, Artificial Sequence
  Description of Artificial Sequence: Synthetic oligonucleotide
  Target: PCSK9; (+) strand; PAM type: YTN; PAM sequence: TTT
gagttgtttctaggtttcct

SEQ ID NO: 27506 - DNA, 20 bp, Artificial Sequence
  Description of Artificial Sequence: Synthetic oligonucleotide
  Target: PCSK9; (+) strand; PAM type: YTN; PAM sequence: TTG
agttgtttctaggtttccta

SEQ ID NO: 27507 - DNA, 20 bp, Artificial Sequence
  Description of Artificial Sequence: Synthetic oligonucleotide
  Target: PCSK9; (+) strand; PAM type: YTN; PAM sequence: TTG
tttctaggtttcctagctct

SEQ ID NO: 27508 - DNA, 20 bp, Artificial Sequence
  Description of Artificial Sequence: Synthetic oligonucleotide
  Target: PCSK9; (+) strand; PAM type: YTN; PAM sequence: TTT
ctaggtttcctagctcttgc

SEQ ID NO: 27509 - DNA, 20 bp, Artificial Sequence
  Description of Artificial Sequence: Synthetic oligonucleotide
  Target: PCSK9; (+) strand; PAM type: YTN; PAM sequence: TTC
taggtttcctagctcttgcc

SEQ ID NO: 27510 - DNA, 20 bp, Artificial Sequence
  Description of Artificial Sequence: Synthetic oligonucleotide
  Target: PCSK9; (+) strand; PAM type: YTN; PAM sequence: CTA
ggtttcctagctcttgcctc

SEQ ID NO: 27511 - DNA, 20 bp, Artificial Sequence
  Description of Artificial Sequence: Synthetic oligonucleotide
  Target: PCSK9; (+) strand; PAM type: YTN; PAM sequence: TTT
cctagctcttgcctcagacc

SEQ ID NO: 27512 - DNA, 20 bp, Artificial Sequence
  Description of Artificial Sequence: Synthetic oligonucleotide
  Target: PCSK9; (+) strand; PAM type: YTN; PAM sequence: TTC
ctagctcttgcctcagacct

SEQ ID NO: 27513 - DNA, 20 bp, Artificial Sequence
  Description of Artificial Sequence: Synthetic oligonucleotide
  Target: PCSK9; (+) strand; PAM type: YTN; PAM sequence: CTA
gctcttgcctcagaccttaa

SEQ ID NO: 27514 - DNA, 20 bp, Artificial Sequence
  Description of Artificial Sequence: Synthetic oligonucleotide
  Target: PCSK9; (+) strand; PAM type: YTN; PAM sequence: CTC
ttgcctcagaccttaaagag

SEQ ID NO: 27515 - DNA, 20 bp, Artificial Sequence
  Description of Artificial Sequence: Synthetic oligonucleotide
  Target: PCSK9; (+) strand; PAM type: YTN; PAM sequence: CTT
gcctcagaccttaaagagag

SEQ ID NO: 27516 - DNA, 20 bp, Artificial Sequence
  Description of Artificial Sequence: Synthetic oligonucleotide
  Target: PCSK9; (+) strand; PAM type: YTN; PAM sequence: TTG
cctcagaccttaaagagaga

SEQ ID NO: 27517 - DNA, 20 bp, Artificial Sequence
  Description of Artificial Sequence: Synthetic oligonucleotide
  Target: PCSK9; (+) strand; PAM type: YTN; PAM sequence: CTC
agaccttaaagagagagggt

SEQ ID NO: 27518 - DNA, 20 bp, Artificial Sequence
  Description of Artificial Sequence: Synthetic oligonucleotide
  Target: PCSK9; (+) strand; PAM type: YTN; PAM sequence: CTT
aaagagagagggtctgatgg

SEQ ID NO: 27519 - DNA, 20 bp, Artificial Sequence
  Description of Artificial Sequence: Synthetic oligonucleotide
  Target: PCSK9; (+) strand; PAM type: YTN; PAM sequence: TTA
aagagagagggtctgatggg

SEQ ID NO: 27520 - DNA, 20 bp, Artificial Sequence
  Description of Artificial Sequence: Synthetic oligonucleotide
  Target: PCSK9; (+) strand; PAM type: YTN; PAM sequence: CTG
atggggatgggcactggaga

SEQ ID NO: 27521 - DNA, 20 bp, Artificial Sequence
  Description of Artificial Sequence: Synthetic oligonucleotide
  Target: PCSK9; (+) strand; PAM type: YTN; PAM sequence: CTG
gagacggagcatcccagcat

SEQ ID NO: 27522 - DNA, 20 bp, Artificial Sequence
  Description of Artificial Sequence: Synthetic oligonucleotide
  Target: PCSK9; (+) strand; PAM type: YTN; PAM sequence: TTT
cacatctgagctggctttcc

SEQ ID NO: 27523 - DNA, 20 bp, Artificial Sequence
  Description of Artificial Sequence: Synthetic oligonucleotide
  Target: PCSK9; (+) strand; PAM type: YTN; PAM sequence: TTC
acatctgagctggctttcct

SEQ ID NO: 27524 - DNA, 20 bp, Artificial Sequence
  Description of Artificial Sequence: Synthetic oligonucleotide
  Target: PCSK9; (+) strand; PAM type: YTN; PAM sequence: CTG
agctggctttcctctgcccc

SEQ ID NO: 27525 - DNA, 20 bp, Artificial Sequence
  Description of Artificial Sequence: Synthetic oligonucleotide
  Target: PCSK9; (+) strand; PAM type: YTN; PAM sequence: CTG
gctttcctctgccccaggct

SEQ ID NO: 27526 - DNA, 20 bp, Artificial Sequence
  Description of Artificial Sequence: Synthetic oligonucleotide
  Target: PCSK9; (+) strand; PAM type: YTN; PAM sequence: CTT
tcctctgccccaggctgcag

SEQ ID NO: 27527 - DNA, 20 bp, Artificial Sequence
  Description of Artificial Sequence: Synthetic oligonucleotide
  Target: PCSK9; (+) strand; PAM type: YTN; PAM sequence: TTT
cctctgccccaggctgcagc

SEQ ID NO: 27528 - DNA, 20 bp, Artificial Sequence
  Description of Artificial Sequence: Synthetic oligonucleotide
  Target: PCSK9; (+) strand; PAM type: YTN; PAM sequence: TTC
ctctgccccaggctgcagct

SEQ ID NO: 27529 - DNA, 20 bp, Artificial Sequence
  Description of Artificial Sequence: Synthetic oligonucleotide
  Target: PCSK9; (+) strand; PAM type: YTN; PAM sequence: CTC
tgccccaggctgcagctccc

SEQ ID NO: 27530 - DNA, 20 bp, Artificial Sequence
  Description of Artificial Sequence: Synthetic oligonucleotide
  Target: PCSK9; (+) strand; PAM type: YTN; PAM sequence: CTG
ccccaggctgcagctcccac

SEQ ID NO: 27531 - DNA, 20 bp, Artificial Sequence
  Description of Artificial Sequence: Synthetic oligonucleotide
  Target: PCSK9; (+) strand; PAM type: YTN; PAM sequence: CTG
cagctcccactgggaggtgg

SEQ ID NO: 27532 - DNA, 20 bp, Artificial Sequence
  Description of Artificial Sequence: Synthetic oligonucleotide
  Target: PCSK9; (+) strand; PAM type: YTN; PAM sequence: CTC
ccactgggaggtggaggacc

SEQ ID NO: 27533 - DNA, 20 bp, Artificial Sequence
  Description of Artificial Sequence: Synthetic oligonucleotide
  Target: PCSK9; (+) strand; PAM type: YTN; PAM sequence: CTG
ggaggtggaggaccttggca

SEQ ID NO: 27534 - DNA, 20 bp, Artificial Sequence
  Description of Artificial Sequence: Synthetic oligonucleotide
  Target: PCSK9; (+) strand; PAM type: YTN; PAM sequence: CTT
ggcacccacaagccgcctgt

SEQ ID NO: 27535 - DNA, 20 bp, Artificial Sequence
  Description of Artificial Sequence: Synthetic oligonucleotide
  Target: PCSK9; (+) strand; PAM type: YTN; PAM sequence: TTG
gcacccacaagccgcctgtg

SEQ ID NO: 27536 - DNA, 20 bp, Artificial Sequence
  Description of Artificial Sequence: Synthetic oligonucleotide
  Target: PCSK9; (+) strand; PAM type: YTN; PAM sequence: CTG
tgctgaggccacgaggtcag

SEQ ID NO: 27537 - DNA, 20 bp, Artificial Sequence
  Description of Artificial Sequence: Synthetic oligonucleotide
  Target: PCSK9; (+) strand; PAM type: YTN; PAM sequence: CTG
aggccacgaggtcagcccaa

SEQ ID NO: 27538 - DNA, 20 bp, Artificial Sequence
  Description of Artificial Sequence: Synthetic oligonucleotide
  Target: PCSK9; (+) strand; PAM type: YTN; PAM sequence: CTT
cctgctgccatgccccaggt

SEQ ID NO: 27539 - DNA, 20 bp, Artificial Sequence
  Description of Artificial Sequence: Synthetic oligonucleotide
  Target: PCSK9; (+) strand; PAM type: YTN; PAM sequence: TTC
ctgctgccatgccccaggtc

SEQ ID NO: 27540 - DNA, 20 bp, Artificial Sequence
  Description of Artificial Sequence: Synthetic oligonucleotide
  Target: PCSK9; (+) strand; PAM type: YTN; PAM sequence: CTG
ctgccatgccccaggtctgg

SEQ ID NO: 27541 - DNA, 20 bp, Artificial Sequence
  Description of Artificial Sequence: Synthetic oligonucleotide
  Target: PCSK9; (+) strand; PAM type: YTN; PAM sequence: CTG
ccatgccccaggtctggaat

SEQ ID NO: 27542 - DNA, 20 bp, Artificial Sequence
  Description of Artificial Sequence: Synthetic oligonucleotide
  Target: PCSK9; (+) strand; PAM type: YTN; PAM sequence: CTG
gaatgcaaagtcaaggagca

SEQ ID NO: 27543 - DNA, 20 bp, Artificial Sequence
  Description of Artificial Sequence: Synthetic oligonucleotide
  Target: PCSK9; (+) strand; PAM type: YTN; PAM sequence: CTC
aggagcaggtgaagaggccc

SEQ ID NO: 27544 - DNA, 20 bp, Artificial Sequence
  Description of Artificial Sequence: Synthetic oligonucleotide
  Target: PCSK9; (+) strand; PAM type: YTN; PAM sequence: CTG
cgtgtctctcctgcacagct

SEQ ID NO: 27545 - DNA, 20 bp, Artificial Sequence
  Description of Artificial Sequence: Synthetic oligonucleotide
  Target: PCSK9; (+) strand; PAM type: YTN; PAM sequence: CTC
tcctgcacagcttttctgtg

SEQ ID NO: 27546 - DNA, 20 bp, Artificial Sequence
  Description of Artificial Sequence: Synthetic oligonucleotide
  Target: PCSK9; (+) strand; PAM type: YTN; PAM sequence: CTC
ctgcacagcttttctgtgtc

SEQ ID NO: 27547 - DNA, 20 bp, Artificial Sequence
  Description of Artificial Sequence: Synthetic oligonucleotide
  Target: PCSK9; (+) strand; PAM type: YTN; PAM sequence: CTG
cacagcttttctgtgtcagt

SEQ ID NO: 27548 - DNA, 20 bp, Artificial Sequence
  Description of Artificial Sequence: Synthetic oligonucleotide
  Target: PCSK9; (+) strand; PAM type: YTN; PAM sequence: CTT
ttctgtgtcagtttgtgcca

SEQ ID NO: 27549 - DNA, 20 bp, Artificial Sequence
  Description of Artificial Sequence: Synthetic oligonucleotide
  Target: PCSK9; (+) strand; PAM type: YTN; PAM sequence: TTT
tctgtgtcagtttgtgccac

SEQ ID NO: 27550 - DNA, 20 bp, Artificial Sequence
  Description of Artificial Sequence: Synthetic oligonucleotide
  Target: PCSK9; (+) strand; PAM type: YTN; PAM sequence: TTT
ctgtgtcagtttgtgccacc

SEQ ID NO: 27551 - DNA, 20 bp, Artificial Sequence
  Description of Artificial Sequence: Synthetic oligonucleotide
  Target: PCSK9; (+) strand; PAM type: YTN; PAM sequence: TTC
tgtgtcagtttgtgccacca

SEQ ID NO: 27552 - DNA, 20 bp, Artificial Sequence
  Description of Artificial Sequence: Synthetic oligonucleotide
  Target: PCSK9; (+) strand; PAM type: YTN; PAM sequence: CTG
tgtcagtttgtgccaccacc

SEQ ID NO: 27553 - DNA, 20 bp, Artificial Sequence
  Description of Artificial Sequence: Synthetic oligonucleotide
  Target: PCSK9; (+) strand; PAM type: YTN; PAM sequence: TTT
gtgccaccaccataccgcca

SEQ ID NO: 27554 - DNA, 20 bp, Artificial Sequence
  Description of Artificial Sequence: Synthetic oligonucleotide
  Target: PCSK9; (+) strand; PAM type: YTN; PAM sequence: TTG
tgccaccaccataccgccat

SEQ ID NO: 27555 - DNA, 20 bp, Artificial Sequence
  Description of Artificial Sequence: Synthetic oligonucleotide
  Target: PCSK9; (+) strand; PAM type: YTN; PAM sequence: TTT
gccaggtagatgctgtgggc

SEQ ID NO: 27556 - DNA, 20 bp, Artificial Sequence
  Description of Artificial Sequence: Synthetic oligonucleotide
  Target: PCSK9; (+) strand; PAM type: YTN; PAM sequence: TTG
ccaggtagatgctgtgggca

SEQ ID NO: 27557 - DNA, 20 bp, Artificial Sequence
  Description of Artificial Sequence: Synthetic oligonucleotide
  Target: PCSK9; (+) strand; PAM type: YTN; PAM sequence: CTG
tgggcagcttccgccattgt

SEQ ID NO: 27558 - DNA, 20 bp, Artificial Sequence
  Description of Artificial Sequence: Synthetic oligonucleotide
  Target: PCSK9; (+) strand; PAM type: YTN; PAM sequence: CTT
ccgccattgtgtggacagca

SEQ ID NO: 27559 - DNA, 20 bp, Artificial Sequence
  Description of Artificial Sequence: Synthetic oligonucleotide
  Target: PCSK9; (+) strand; PAM type: YTN; PAM sequence: TTC
cgccattgtgtggacagcat

SEQ ID NO: 27560 - DNA, 20 bp, Artificial Sequence
  Description of Artificial Sequence: Synthetic oligonucleotide
  Target: PCSK9; (+) strand; PAM type: YTN; PAM sequence: TTG
tgtggacagcatgtatatgt

SEQ ID NO: 27561 - DNA, 20 bp, Artificial Sequence
  Description of Artificial Sequence: Synthetic oligonucleotide
  Target: PCSK9; (+) strand; PAM type: YTN; PAM sequence: CTC
tgtgtggctgggtctgtttt

SEQ ID NO: 27562 - DNA, 20 bp, Artificial Sequence
  Description of Artificial Sequence: Synthetic oligonucleotide
  Target: PCSK9; (+) strand; PAM type: YTN; PAM sequence: CTG
tgtggctgggtctgtttttg

SEQ ID NO: 27563 - DNA, 20 bp, Artificial Sequence
  Description of Artificial Sequence: Synthetic oligonucleotide
  Target: PCSK9; (+) strand; PAM type: YTN; PAM sequence: CTG
ggtctgtttttgcttttgtc

SEQ ID NO: 27564 - DNA, 20 bp, Artificial Sequence
  Description of Artificial Sequence: Synthetic oligonucleotide
  Target: PCSK9; (+) strand; PAM type: YTN; PAM sequence: CTG
tttttgcttttgtccagatc

SEQ ID NO: 27565 - DNA, 20 bp, Artificial Sequence
  Description of Artificial Sequence: Synthetic oligonucleotide
  Target: PCSK9; (+) strand; PAM type: YTN; PAM sequence: TTT
ttgcttttgtccagatcagt

SEQ ID NO: 27566 - DNA, 20 bp, Artificial Sequence
  Description of Artificial Sequence: Synthetic oligonucleotide
  Target: PCSK9; (+) strand; PAM type: YTN; PAM sequence: TTT
tgcttttgtccagatcagta

SEQ ID NO: 27567 - DNA, 20 bp, Artificial Sequence
  Description of Artificial Sequence: Synthetic oligonucleotide
  Target: PCSK9; (+) strand; PAM type: YTN; PAM sequence: TTT
gcttttgtccagatcagtaa

SEQ ID NO: 27568 - DNA, 20 bp, Artificial Sequence
  Description of Artificial Sequence: Synthetic oligonucleotide
  Target: PCSK9; (+) strand; PAM type: YTN; PAM sequence: TTG
cttttgtccagatcagtaag

SEQ ID NO: 27569 - DNA, 20 bp, Artificial Sequence
  Description of Artificial Sequence: Synthetic oligonucleotide
  Target: PCSK9; (+) strand; PAM type: YTN; PAM sequence: CTT
ttgtccagatcagtaaggtt

SEQ ID NO: 27570 - DNA, 20 bp, Artificial Sequence
  Description of Artificial Sequence: Synthetic oligonucleotide
  Target: PCSK9; (+) strand; PAM type: YTN; PAM sequence: TTT
tgtccagatcagtaaggttt

SEQ ID NO: 27571 - DNA, 20 bp, Artificial Sequence
  Description of Artificial Sequence: Synthetic oligonucleotide
  Target: PCSK9; (+) strand; PAM type: YTN; PAM sequence: TTT
gtccagatcagtaaggtttg

SEQ ID NO: 27572 - DNA, 20 bp, Artificial Sequence
  Description of Artificial Sequence: Synthetic oligonucleotide
  Target: PCSK9; (+) strand; PAM type: YTN; PAM sequence: TTG
tccagatcagtaaggtttgc

SEQ ID NO: 27573 - DNA, 20 bp, Artificial Sequence
  Description of Artificial Sequence: Synthetic oligonucleotide
  Target: PCSK9; (+) strand; PAM type: YTN; PAM sequence: TTT
gctacctgggtaccccactc

SEQ ID NO: 27574 - DNA, 20 bp, Artificial Sequence
  Description of Artificial Sequence: Synthetic oligonucleotide
  Target: PCSK9; (+) strand; PAM type: YTN; PAM sequence: TTG
ctacctgggtaccccactcc

SEQ ID NO: 27575 - DNA, 20 bp, Artificial Sequence
  Description of Artificial Sequence: Synthetic oligonucleotide
  Target: PCSK9; (+) strand; PAM type: YTN; PAM sequence: CTA
cctgggtaccccactccact

SEQ ID NO: 27576 - DNA, 20 bp, Artificial Sequence
  Description of Artificial Sequence: Synthetic oligonucleotide
  Target: PCSK9; (+) strand; PAM type: YTN; PAM sequence: CTG
ggtaccccactccacttgga

SEQ ID NO: 27577 - DNA, 20 bp, Artificial Sequence
  Description of Artificial Sequence: Synthetic oligonucleotide
  Target: PCSK9; (+) strand; PAM type: YTN; PAM sequence: CTC
cacttggagtagaatgtgca

SEQ ID NO: 27578 - DNA, 20 bp, Artificial Sequence
  Description of Artificial Sequence: Synthetic oligonucleotide
  Target: PCSK9; (+) strand; PAM type: YTN; PAM sequence: CTT
ggagtagaatgtgcataaat

SEQ ID NO: 27579 - DNA, 20 bp, Artificial Sequence
  Description of Artificial Sequence: Synthetic oligonucleotide
  Target: PCSK9; (+) strand; PAM type: YTN; PAM sequence: TTG
gagtagaatgtgcataaata

SEQ ID NO: 27580 - DNA, 20 bp, Artificial Sequence
  Description of Artificial Sequence: Synthetic oligonucleotide
  Target: PCSK9; (+) strand; PAM type: YTN; PAM sequence: TTT
attgattgatctattttttt

SEQ ID NO: 27581 - DNA, 20 bp, Artificial Sequence
  Description of Artificial Sequence: Synthetic oligonucleotide
  Target: PCSK9; (+) strand; PAM type: YTN; PAM sequence: TTA
ttgattgatctatttttttc

SEQ ID NO: 27582 - DNA, 20 bp, Artificial Sequence
  Description of Artificial Sequence: Synthetic oligonucleotide
  Target: PCSK9; (+) strand; PAM type: YTN; PAM sequence: TTG
attgatctatttttttctga

SEQ ID NO: 27583 - DNA, 20 bp, Artificial Sequence
  Description of Artificial Sequence: Synthetic oligonucleotide
  Target: PCSK9; (+) strand; PAM type: YTN; PAM sequence: TTG
atctatttttttctgagatg

SEQ ID NO: 27584 - DNA, 20 bp, Artificial Sequence
  Description of Artificial Sequence: Synthetic oligonucleotide
  Target: PCSK9; (+) strand; PAM type: YTN; PAM sequence: CTA
tttttttctgagatggggtc

SEQ ID NO: 27585 - DNA, 20 bp, Artificial Sequence
  Description of Artificial Sequence: Synthetic oligonucleotide
  Target: PCSK9; (+) strand; PAM type: YTN; PAM sequence: TTT
ttttctgagatggggtcttg

SEQ ID NO: 27586 - DNA, 20 bp, Artificial Sequence
  Description of Artificial Sequence: Synthetic oligonucleotide
  Target: PCSK9; (+) strand; PAM type: YTN; PAM sequence: TTT
tttctgagatggggtcttgc

SEQ ID NO: 27587 - DNA, 20 bp, Artificial Sequence
  Description of Artificial Sequence: Synthetic oligonucleotide
  Target: PCSK9; (+) strand; PAM type: YTN; PAM sequence: TTT
ttctgagatggggtcttgct

SEQ ID NO: 27588 - DNA, 20 bp, Artificial Sequence
  Description of Artificial Sequence: Synthetic oligonucleotide
  Target: PCSK9; (+) strand; PAM type: YTN; PAM sequence: TTT
tctgagatggggtcttgctg

SEQ ID NO: 27589 - DNA, 20 bp, Artificial Sequence
  Description of Artificial Sequence: Synthetic oligonucleotide
  Target: PCSK9; (+) strand; PAM type: YTN; PAM sequence: TTT
ctgagatggggtcttgctgt

SEQ ID NO: 27590 - DNA, 20 bp, Artificial Sequence
  Description of Artificial Sequence: Synthetic oligonucleotide
  Target: PCSK9; (+) strand; PAM type: YTN; PAM sequence: TTC
tgagatggggtcttgctgtg

SEQ ID NO: 27591 - DNA, 20 bp, Artificial Sequence
  Description of Artificial Sequence: Synthetic oligonucleotide
  Target: PCSK9; (+) strand; PAM type: YTN; PAM sequence: CTG
agatggggtcttgctgtgtt

SEQ ID NO: 27592 - DNA, 20 bp, Artificial Sequence
  Description of Artificial Sequence: Synthetic oligonucleotide
  Target: PCSK9; (+) strand; PAM type: YTN; PAM sequence: CTT
gctgtgttgcccaggctggt

SEQ ID NO: 27593 - DNA, 20 bp, Artificial Sequence
  Description of Artificial Sequence: Synthetic oligonucleotide
  Target: PCSK9; (+) strand; PAM type: YTN; PAM sequence: TTG
ctgtgttgcccaggctggtc

SEQ ID NO: 27594 - DNA, 20 bp, Artificial Sequence
  Description of Artificial Sequence: Synthetic oligonucleotide
  Target: PCSK9; (+) strand; PAM type: YTN; PAM sequence: CTG
tgttgcccaggctggtctca

SEQ ID NO: 27595 - DNA, 20 bp, Artificial Sequence
  Description of Artificial Sequence: Synthetic oligonucleotide
  Target: PCSK9; (+) strand; PAM type: YTN; PAM sequence: TTG
cccaggctggtctcaaattc

SEQ ID NO: 27596 - DNA, 20 bp, Artificial Sequence
  Description of Artificial Sequence: Synthetic oligonucleotide
  Target: PCSK9; (+) strand; PAM type: YTN; PAM sequence: CTG
gtctcaaattcctgggctca

SEQ ID NO: 27597 - DNA, 20 bp, Artificial Sequence
  Description of Artificial Sequence: Synthetic oligonucleotide
  Target: PCSK9; (+) strand; PAM type: YTN; PAM sequence: CTC
aaattcctgggctcaagcaa

SEQ ID NO: 27598 - DNA, 20 bp, Artificial Sequence
  Description of Artificial Sequence: Synthetic oligonucleotide
  Target: PCSK9; (+) strand; PAM type: YTN; PAM sequence: TTC
ctgggctcaagcaatcctct

SEQ ID NO: 27599 - DNA, 20 bp, Artificial Sequence
  Description of Artificial Sequence: Synthetic oligonucleotide
  Target: PCSK9; (+) strand; PAM type: YTN; PAM sequence: CTG
ggctcaagcaatcctctggt

SEQ ID NO: 27600 - DNA, 20 bp, Artificial Sequence
  Description of Artificial Sequence: Synthetic oligonucleotide
  Target: PCSK9; (+) strand; PAM type: YTN; PAM sequence: CTC
aagcaatcctctggtctcag

SEQ ID NO: 27601 - DNA, 20 bp, Artificial Sequence
  Description of Artificial Sequence: Synthetic oligonucleotide
  Target: PCSK9; (+) strand; PAM type: YTN; PAM sequence: CTC
tggtctcagcctccccaagt

SEQ ID NO: 27602 - DNA, 20 bp, Artificial Sequence
  Description of Artificial Sequence: Synthetic oligonucleotide
  Target: PCSK9; (+) strand; PAM type: YTN; PAM sequence: CTG
gtctcagcctccccaagtgt

SEQ ID NO: 27603 - DNA, 20 bp, Artificial Sequence
  Description of Artificial Sequence: Synthetic oligonucleotide
  Target: PCSK9; (+) strand; PAM type: YTN; PAM sequence: CTC
agcctccccaagtgttggga

SEQ ID NO: 27604 - DNA, 20 bp, Artificial Sequence
  Description of Artificial Sequence: Synthetic oligonucleotide
  Target: PCSK9; (+) strand; PAM type: YTN; PAM sequence: CTC
cccaagtgttgggattatag

SEQ ID NO: 27605 - DNA, 20 bp, Artificial Sequence
  Description of Artificial Sequence: Synthetic oligonucleotide
  Target: PCSK9; (+) strand; PAM type: YTN; PAM sequence: TTG
ggattataggcatgagccgc

SEQ ID NO: 27606 - DNA, 20 bp, Artificial Sequence
  Description of Artificial Sequence: Synthetic oligonucleotide
  Target: PCSK9; (+) strand; PAM type: YTN; PAM sequence: TTA
taggcatgagccgctgcacc

SEQ ID NO: 27607 - DNA, 20 bp, Artificial Sequence
  Description of Artificial Sequence: Synthetic oligonucleotide
  Target: PCSK9; (+) strand; PAM type: YTN; PAM sequence: CTG
cacctggcctctctgatcta

SEQ ID NO: 27608 - DNA, 20 bp, Artificial Sequence
  Description of Artificial Sequence: Synthetic oligonucleotide
  Target: PCSK9; (+) strand; PAM type: YTN; PAM sequence: CTG
gcctctctgatctatttaac

SEQ ID NO: 27609 - DNA, 20 bp, Artificial Sequence
  Description of Artificial Sequence: Synthetic oligonucleotide
  Target: PCSK9; (+) strand; PAM type: YTN; PAM sequence: CTC
tctgatctatttaacaaacc

SEQ ID NO: 27610 - DNA, 20 bp, Artificial Sequence
  Description of Artificial Sequence: Synthetic oligonucleotide
  Target: PCSK9; (+) strand; PAM type: YTN; PAM sequence: CTC
tgatctatttaacaaacctg

SEQ ID NO: 27611 - DNA, 20 bp, Artificial Sequence
  Description of Artificial Sequence: Synthetic oligonucleotide
  Target: PCSK9; (+) strand; PAM type: YTN; PAM sequence: CTG
atctatttaacaaacctgct

SEQ ID NO: 27612 - DNA, 20 bp, Artificial Sequence
  Description of Artificial Sequence: Synthetic oligonucleotide
  Target: PCSK9; (+) strand; PAM type: YTN; PAM sequence: CTA
tttaacaaacctgctgggag

SEQ ID NO: 27613 - DNA, 20 bp, Artificial Sequence
  Description of Artificial Sequence: Synthetic oligonucleotide
  Target: PCSK9; (+) strand; PAM type: YTN; PAM sequence: TTT
aacaaacctgctgggagggt

SEQ ID NO: 27614 - DNA, 20 bp, Artificial Sequence
  Description of Artificial Sequence: Synthetic oligonucleotide
  Target: PCSK9; (+) strand; PAM type: YTN; PAM sequence: TTA
acaaacctgctgggagggtc

SEQ ID NO: 27615 - DNA, 20 bp, Artificial Sequence
  Description of Artificial Sequence: Synthetic oligonucleotide
  Target: PCSK9; (+) strand; PAM type: YTN; PAM sequence: CTG
ctgggagggtctcagggtca

SEQ ID NO: 27616 - DNA, 20 bp, Artificial Sequence
  Description of Artificial Sequence: Synthetic oligonucleotide
  Target: PCSK9; (+) strand; PAM type: YTN; PAM sequence: CTG
ggagggtctcagggtcagga

SEQ ID NO: 27617 - DNA, 20 bp, Artificial Sequence
  Description of Artificial Sequence: Synthetic oligonucleotide
  Target: PCSK9; (+) strand; PAM type: YTN; PAM sequence: CTC
agggtcaggagcagcactgg

SEQ ID NO: 27618 - DNA, 20 bp, Artificial Sequence
  Description of Artificial Sequence: Synthetic oligonucleotide
  Target: PCSK9; (+) strand; PAM type: YTN; PAM sequence: CTG
ggctctgaggacacagagct

SEQ ID NO: 27619 - DNA, 20 bp, Artificial Sequence
  Description of Artificial Sequence: Synthetic oligonucleotide
  Target: PCSK9; (+) strand; PAM type: YTN; PAM sequence: CTC
tgaggacacagagctcactc

SEQ ID NO: 27620 - DNA, 20 bp, Artificial Sequence
  Description of Artificial Sequence: Synthetic oligonucleotide
  Target: PCSK9; (+) strand; PAM type: YTN; PAM sequence: CTG
aggacacagagctcactcag

SEQ ID NO: 27621 - DNA, 20 bp, Artificial Sequence
  Description of Artificial Sequence: Synthetic oligonucleotide
  Target: PCSK9; (+) strand; PAM type: YTN; PAM sequence: CTC
actcagccgtgacccagagg

SEQ ID NO: 27622 - DNA, 20 bp, Artificial Sequence
  Description of Artificial Sequence: Synthetic oligonucleotide
  Target: PCSK9; (+) strand; PAM type: YTN; PAM sequence: CTC
agccgtgacccagagggggt

SEQ ID NO: 27623 - DNA, 20 bp, Artificial Sequence
  Description of Artificial Sequence: Synthetic oligonucleotide
  Target: PCSK9; (+) strand; PAM type: YTN; PAM sequence: CTG
agctgcatgctgaaggttgt

SEQ ID NO: 27624 - DNA, 20 bp, Artificial Sequence
  Description of Artificial Sequence: Synthetic oligonucleotide
  Target: PCSK9; (+) strand; PAM type: YTN; PAM sequence: CTG
catgctgaaggttgttagca

SEQ ID NO: 27625 - DNA, 20 bp, Artificial Sequence
  Description of Artificial Sequence: Synthetic oligonucleotide
  Target: PCSK9; (+) strand; PAM type: YTN; PAM sequence: CTG
aaggttgttagcatgaccag

SEQ ID NO: 27626 - DNA, 20 bp, Artificial Sequence
  Description of Artificial Sequence: Synthetic oligonucleotide
  Target: PCSK9; (+) strand; PAM type: YTN; PAM sequence: TTG
ttagcatgaccagcaaggca

SEQ ID NO: 27627 - DNA, 20 bp, Artificial Sequence
  Description of Artificial Sequence: Synthetic oligonucleotide
  Target: PCSK9; (+) strand; PAM type: YTN; PAM sequence: TTA
gcatgaccagcaaggcaaga

SEQ ID NO: 27628 - DNA, 20 bp, Artificial Sequence
  Description of Artificial Sequence: Synthetic oligonucleotide
  Target: PCSK9; (+) strand; PAM type: YTN; PAM sequence: CTG
ccgagattagcaaggcatgt

SEQ ID NO: 27629 - DNA, 20 bp, Artificial Sequence
  Description of Artificial Sequence: Synthetic oligonucleotide
  Target: PCSK9; (+) strand; PAM type: YTN; PAM sequence: TTA
gcaaggcatgtgccaagccc

SEQ ID NO: 27630 - DNA, 20 bp, Artificial Sequence
  Description of Artificial Sequence: Synthetic oligonucleotide
  Target: PCSK9; (+) strand; PAM type: YTN; PAM sequence: CTG
gaatgtgacagccgggcctt

SEQ ID NO: 27631 - DNA, 20 bp, Artificial Sequence
  Description of Artificial Sequence: Synthetic oligonucleotide
  Target: PCSK9; (+) strand; PAM type: YTN; PAM sequence: CTT
ctagaaacctgagtgtataa

SEQ ID NO: 27632 - DNA, 20 bp, Artificial Sequence
  Description of Artificial Sequence: Synthetic oligonucleotide
  Target: PCSK9; (+) strand; PAM type: YTN; PAM sequence: TTC
tagaaacctgagtgtataac

SEQ ID NO: 27633 - DNA, 20 bp, Artificial Sequence
  Description of Artificial Sequence: Synthetic oligonucleotide
  Target: PCSK9; (+) strand; PAM type: YTN; PAM sequence: CTA
gaaacctgagtgtataactc

SEQ ID NO: 27634 - DNA, 20 bp, Artificial Sequence
  Description of Artificial Sequence: Synthetic oligonucleotide
  Target: PCSK9; (+) strand; PAM type: YTN; PAM sequence: CTG
agtgtataactctccttaaa

SEQ ID NO: 27635 - DNA, 20 bp, Artificial Sequence
  Description of Artificial Sequence: Synthetic oligonucleotide
  Target: PCSK9; (+) strand; PAM type: YTN; PAM sequence: CTC
tccttaaaagccagtaggag

SEQ ID NO: 27636 - DNA, 20 bp, Artificial Sequence
  Description of Artificial Sequence: Synthetic oligonucleotide
  Target: PCSK9; (+) strand; PAM type: YTN; PAM sequence: CTC
cttaaaagccagtaggagct

SEQ ID NO: 27637 - DNA, 20 bp, Artificial Sequence
  Description of Artificial Sequence: Synthetic oligonucleotide
  Target: PCSK9; (+) strand; PAM type: YTN; PAM sequence: CTT
aaaagccagtaggagctcct

SEQ ID NO: 27638 - DNA, 20 bp, Artificial Sequence
  Description of Artificial Sequence: Synthetic oligonucleotide
  Target: PCSK9; (+) strand; PAM type: YTN; PAM sequence: TTA
aaagccagtaggagctcctc

SEQ ID NO: 27639 - DNA, 20 bp, Artificial Sequence
  Description of Artificial Sequence: Synthetic oligonucleotide
  Target: PCSK9; (+) strand; PAM type: YTN; PAM sequence: CTC
ctcaaaaggcagccctaagg

SEQ ID NO: 27640 - DNA, 20 bp, Artificial Sequence
  Description of Artificial Sequence: Synthetic oligonucleotide
  Target: PCSK9; (+) strand; PAM type: YTN; PAM sequence: CTC
aaaaggcagccctaaggagt

SEQ ID NO: 27641 - DNA, 20 bp, Artificial Sequence
  Description of Artificial Sequence: Synthetic oligonucleotide
  Target: PCSK9; (+) strand; PAM type: YTN; PAM sequence: CTA
aggagtccactcttaaatga

SEQ ID NO: 27642 - DNA, 20 bp, Artificial Sequence
  Description of Artificial Sequence: Synthetic oligonucleotide
  Target: PCSK9; (+) strand; PAM type: YTN; PAM sequence: CTC
ttaaatgaactcagagtcag

SEQ ID NO: 27643 - DNA, 20 bp, Artificial Sequence
  Description of Artificial Sequence: Synthetic oligonucleotide
  Target: PCSK9; (+) strand; PAM type: YTN; PAM sequence: CTT
aaatgaactcagagtcagtt

SEQ ID NO: 27644 - DNA, 20 bp, Artificial Sequence
  Description of Artificial Sequence: Synthetic oligonucleotide
  Target: PCSK9; (+) strand; PAM type: YTN; PAM sequence: TTA
aatgaactcagagtcagttt

SEQ ID NO: 27645 - DNA, 20 bp, Artificial Sequence
  Description of Artificial Sequence: Synthetic oligonucleotide
  Target: PCSK9; (+) strand; PAM type: YTN; PAM sequence: CTC
agagtcagttttaaaatgca

SEQ ID NO: 27646 - DNA, 20 bp, Artificial Sequence
  Description of Artificial Sequence: Synthetic oligonucleotide
  Target: PCSK9; (+) strand; PAM type: YTN; PAM sequence: TTT
taaaatgcaagtctgtgttg

SEQ ID NO: 27647 - DNA, 20 bp, Artificial Sequence
  Description of Artificial Sequence: Synthetic oligonucleotide
  Target: PCSK9; (+) strand; PAM type: YTN; PAM sequence: TTT
aaaatgcaagtctgtgttga

SEQ ID NO: 27648 - DNA, 20 bp, Artificial Sequence
  Description of Artificial Sequence: Synthetic oligonucleotide
  Target: PCSK9; (+) strand; PAM type: YTN; PAM sequence: TTA
aaatgcaagtctgtgttgat

SEQ ID NO: 27649 - DNA, 20 bp, Artificial Sequence
  Description of Artificial Sequence: Synthetic oligonucleotide
  Target: PCSK9; (+) strand; PAM type: YTN; PAM sequence: CTG
tgttgattctggtctggatg

SEQ ID NO: 27650 - DNA, 20 bp, Artificial Sequence
  Description of Artificial Sequence: Synthetic oligonucleotide
  Target: PCSK9; (+) strand; PAM type: YTN; PAM sequence: TTG
attctggtctggatggtgca

SEQ ID NO: 27651 - DNA, 20 bp, Artificial Sequence
  Description of Artificial Sequence: Synthetic oligonucleotide
  Target: PCSK9; (+) strand; PAM type: YTN; PAM sequence: TTC
tggtctggatggtgcattcc

SEQ ID NO: 27652 - DNA, 20 bp, Artificial Sequence
  Description of Artificial Sequence: Synthetic oligonucleotide
  Target: PCSK9; (+) strand; PAM type: YTN; PAM sequence: CTG
gtctggatggtgcattcctc

SEQ ID NO: 27653 - DNA, 20 bp, Artificial Sequence
  Description of Artificial Sequence: Synthetic oligonucleotide
  Target: PCSK9; (+) strand; PAM type: YTN; PAM sequence: CTG
gatggtgcattcctcgagag

SEQ ID NO: 27654 - DNA, 20 bp, Artificial Sequence
  Description of Artificial Sequence: Synthetic oligonucleotide
  Target: PCSK9; (+) strand; PAM type: YTN; PAM sequence: TTC
ctcgagagcaaaagacagtc

SEQ ID NO: 27655 - DNA, 20 bp, Artificial Sequence
  Description of Artificial Sequence: Synthetic oligonucleotide
  Target: PCSK9; (+) strand; PAM type: YTN; PAM sequence: CTC
gagagcaaaagacagtcttg

SEQ ID NO: 27656 - DNA, 20 bp, Artificial Sequence
  Description of Artificial Sequence: Synthetic oligonucleotide
  Target: PCSK9; (+) strand; PAM type: YTN; PAM sequence: CTT
ggtcttggatccacttgccc

SEQ ID NO: 27657 - DNA, 20 bp, Artificial Sequence
  Description of Artificial Sequence: Synthetic oligonucleotide
  Target: PCSK9; (+) strand; PAM type: YTN; PAM sequence: TTG
gtcttggatccacttgccct

SEQ ID NO: 27658 - DNA, 20 bp, Artificial Sequence
  Description of Artificial Sequence: Synthetic oligonucleotide
  Target: PCSK9; (+) strand; PAM type: YTN; PAM sequence: CTT
ggatccacttgccctgggta

SEQ ID NO: 27659 - DNA, 20 bp, Artificial Sequence
  Description of Artificial Sequence: Synthetic oligonucleotide
  Target: PCSK9; (+) strand; PAM type: YTN; PAM sequence: TTG
gatccacttgccctgggtac

SEQ ID NO: 27660 - DNA, 20 bp, Artificial Sequence
  Description of Artificial Sequence: Synthetic oligonucleotide
  Target: PCSK9; (+) strand; PAM type: YTN; PAM sequence: CTT
gccctgggtacactgagggc

SEQ ID NO: 27661 - DNA, 20 bp, Artificial Sequence
  Description of Artificial Sequence: Synthetic oligonucleotide
  Target: PCSK9; (+) strand; PAM type: YTN; PAM sequence: TTG
ccctgggtacactgagggct

SEQ ID NO: 27662 - DNA, 20 bp, Artificial Sequence
  Description of Artificial Sequence: Synthetic oligonucleotide
  Target: PCSK9; (+) strand; PAM type: YTN; PAM sequence: CTG
ggtacactgagggctgctag

SEQ ID NO: 27663 - DNA, 20 bp, Artificial Sequence
  Description of Artificial Sequence: Synthetic oligonucleotide
  Target: PCSK9; (+) strand; PAM type: YTN; PAM sequence: CTG
agggctgctaggttccaggt

SEQ ID NO: 27664 - DNA, 20 bp, Artificial Sequence
  Description of Artificial Sequence: Synthetic oligonucleotide
  Target: PCSK9; (+) strand; PAM type: YTN; PAM sequence: CTG
ctaggttccaggtgctcttc

SEQ ID NO: 27665 - DNA, 20 bp, Artificial Sequence
  Description of Artificial Sequence: Synthetic oligonucleotide
  Target: PCSK9; (+) strand; PAM type: YTN; PAM sequence: CTA
ggttccaggtgctcttcctg

SEQ ID NO: 27666 - DNA, 20 bp, Artificial Sequence
  Description of Artificial Sequence: Synthetic oligonucleotide
  Target: PCSK9; (+) strand; PAM type: YTN; PAM sequence: TTC
caggtgctcttcctggcact

SEQ ID NO: 27667 - DNA, 20 bp, Artificial Sequence
  Description of Artificial Sequence: Synthetic oligonucleotide
  Target: PCSK9; (+) strand; PAM type: YTN; PAM sequence: CTC
ttcctggcactggggaggga

SEQ ID NO: 27668 - DNA, 20 bp, Artificial Sequence
  Description of Artificial Sequence: Synthetic oligonucleotide
  Target: PCSK9; (+) strand; PAM type: YTN; PAM sequence: CTT
cctggcactggggagggata

SEQ ID NO: 27669 - DNA, 20 bp, Artificial Sequence
  Description of Artificial Sequence: Synthetic oligonucleotide
  Target: PCSK9; (+) strand; PAM type: YTN; PAM sequence: TTC
ctggcactggggagggatac

SEQ ID NO: 27670 - DNA, 20 bp, Artificial Sequence
  Description of Artificial Sequence: Synthetic oligonucleotide
  Target: PCSK9; (+) strand; PAM type: YTN; PAM sequence: CTG
gcactggggagggatacagg

SEQ ID NO: 27671 - DNA, 20 bp, Artificial Sequence
  Description of Artificial Sequence: Synthetic oligonucleotide
  Target: PCSK9; (+) strand; PAM type: YTN; PAM sequence: CTG
gggagggatacaggcccaag

SEQ ID NO: 27672 - DNA, 20 bp, Artificial Sequence
  Description of Artificial Sequence: Synthetic oligonucleotide
  Target: PCSK9; (+) strand; PAM type: YTN; PAM sequence: CTG
ttctccctcctggagcatct

SEQ ID NO: 27673 - DNA, 20 bp, Artificial Sequence
  Description of Artificial Sequence: Synthetic oligonucleotide
  Target: PCSK9; (+) strand; PAM type: YTN; PAM sequence: TTC
tccctcctggagcatctatt

SEQ ID NO: 27674 - DNA, 20 bp, Artificial Sequence
  Description of Artificial Sequence: Synthetic oligonucleotide
  Target: PCSK9; (+) strand; PAM type: YTN; PAM sequence: CTC
cctcctggagcatctatttt

SEQ ID NO: 27675 - DNA, 20 bp, Artificial Sequence
  Description of Artificial Sequence: Synthetic oligonucleotide
  Target: PCSK9; (+) strand; PAM type: YTN; PAM sequence: CTC
ctggagcatctattttagtg

SEQ ID NO: 27676 - DNA, 20 bp, Artificial Sequence
  Description of Artificial Sequence: Synthetic oligonucleotide
  Target: PCSK9; (+) strand; PAM type: YTN; PAM sequence: CTG
gagcatctattttagtggag

SEQ ID NO: 27677 - DNA, 20 bp, Artificial Sequence
  Description of Artificial Sequence: Synthetic oligonucleotide
  Target: PCSK9; (+) strand; PAM type: YTN; PAM sequence: CTA
ttttagtggaggaagacaga

SEQ ID NO: 27678 - DNA, 20 bp, Artificial Sequence
  Description of Artificial Sequence: Synthetic oligonucleotide
  Target: PCSK9; (+) strand; PAM type: YTN; PAM sequence: TTT
tagtggaggaagacagaaaa

SEQ ID NO: 27679 - DNA, 20 bp, Artificial Sequence
  Description of Artificial Sequence: Synthetic oligonucleotide
  Target: PCSK9; (+) strand; PAM type: YTN; PAM sequence: TTT
agtggaggaagacagaaaac

SEQ ID NO: 27680 - DNA, 20 bp, Artificial Sequence
  Description of Artificial Sequence: Synthetic oligonucleotide
  Target: PCSK9; (+) strand; PAM type: YTN; PAM sequence: TTA
gtggaggaagacagaaaaca

SEQ ID NO: 27681 - DNA, 20 bp, Artificial Sequence
  Description of Artificial Sequence: Synthetic oligonucleotide
  Target: PCSK9; (+) strand; PAM type: YTN; PAM sequence: TTA
atatagagtactgaaaagat

SEQ ID NO: 27682 - DNA, 20 bp, Artificial Sequence
  Description of Artificial Sequence: Synthetic oligonucleotide
  Target: PCSK9; (+) strand; PAM type: YTN; PAM sequence: CTG
aaaagatgcgatggagaaaa

SEQ ID NO: 27683 - DNA, 20 bp, Artificial Sequence
  Description of Artificial Sequence: Synthetic oligonucleotide
  Target: PCSK9; (+) strand; PAM type: YTN; PAM sequence: CTA
tagcaaggaagggaatgggg

SEQ ID NO: 27684 - DNA, 20 bp, Artificial Sequence
  Description of Artificial Sequence: Synthetic oligonucleotide
  Target: PCSK9; (+) strand; PAM type: YTN; PAM sequence: CTC
gctgacaaggtggacgaaac

SEQ ID NO: 27685 - DNA, 20 bp, Artificial Sequence
  Description of Artificial Sequence: Synthetic oligonucleotide
  Target: PCSK9; (+) strand; PAM type: YTN; PAM sequence: CTG
acaaggtggacgaaacaggc

SEQ ID NO: 27686 - DNA, 20 bp, Artificial Sequence
  Description of Artificial Sequence: Synthetic oligonucleotide
  Target: PCSK9; (+) strand; PAM type: YTN; PAM sequence: TTC
caggcaaagcaaaggccccc

SEQ ID NO: 27687 - DNA, 20 bp, Artificial Sequence
  Description of Artificial Sequence: Synthetic oligonucleotide
  Target: PCSK9; (+) strand; PAM type: YTN; PAM sequence: TTA
tgagatggggggtgcctcag

SEQ ID NO: 27688 - DNA, 20 bp, Artificial Sequence
  Description of Artificial Sequence: Synthetic oligonucleotide
  Target: PCSK9; (+) strand; PAM type: YTN; PAM sequence: CTC
agaggggacagggccaagtc

SEQ ID NO: 27689 - DNA, 20 bp, Artificial Sequence
  Description of Artificial Sequence: Synthetic oligonucleotide
  Target: PCSK9; (+) strand; PAM type: YTN; PAM sequence: CTG
agggtcacagtcagcagtga

SEQ ID NO: 27690 - DNA, 20 bp, Artificial Sequence
  Description of Artificial Sequence: Synthetic oligonucleotide
  Target: PCSK9; (+) strand; PAM type: YTN; PAM sequence: CTG
gggccatgcaggggtctggc

SEQ ID NO: 27691 - DNA, 20 bp, Artificial Sequence
  Description of Artificial Sequence: Synthetic oligonucleotide
  Target: PCSK9; (+) strand; PAM type: YTN; PAM sequence: CTG
gcctcagaggagtgtggtct

SEQ ID NO: 27692 - DNA, 20 bp, Artificial Sequence
  Description of Artificial Sequence: Synthetic oligonucleotide
  Target: PCSK9; (+) strand; PAM type: YTN; PAM sequence: CTC
agaggagtgtggtctggcct

SEQ ID NO: 27693 - DNA, 20 bp, Artificial Sequence
  Description of Artificial Sequence: Synthetic oligonucleotide
  Target: PCSK9; (+) strand; PAM type: YTN; PAM sequence: CTG
gcctggatctgaacctctca

SEQ ID NO: 27694 - DNA, 20 bp, Artificial Sequence
  Description of Artificial Sequence: Synthetic oligonucleotide
  Target: PCSK9; (+) strand; PAM type: YTN; PAM sequence: CTG
gatctgaacctctcactgtg

SEQ ID NO: 27695 - DNA, 20 bp, Artificial Sequence
  Description of Artificial Sequence: Synthetic oligonucleotide
  Target: PCSK9; (+) strand; PAM type: YTN; PAM sequence: CTG
aacctctcactgtggcctag

SEQ ID NO: 27696 - DNA, 20 bp, Artificial Sequence
  Description of Artificial Sequence: Synthetic oligonucleotide
  Target: PCSK9; (+) strand; PAM type: YTN; PAM sequence: CTC
tcactgtggcctagctgctg

SEQ ID NO: 27697 - DNA, 20 bp, Artificial Sequence
  Description of Artificial Sequence: Synthetic oligonucleotide
  Target: PCSK9; (+) strand; PAM type: YTN; PAM sequence: CTC
actgtggcctagctgctgag

SEQ ID NO: 27698 - DNA, 20 bp, Artificial Sequence
  Description of Artificial Sequence: Synthetic oligonucleotide
  Target: PCSK9; (+) strand; PAM type: YTN; PAM sequence: CTG
tggcctagctgctgagctga

SEQ ID NO: 27699 - DNA, 20 bp, Artificial Sequence
  Description of Artificial Sequence: Synthetic oligonucleotide
  Target: PCSK9; (+) strand; PAM type: YTN; PAM sequence: CTA
gctgctgagctgagaagaga

SEQ ID NO: 27700 - DNA, 20 bp, Artificial Sequence
  Description of Artificial Sequence: Synthetic oligonucleotide
  Target: PCSK9; (+) strand; PAM type: YTN; PAM sequence: CTG
ctgagctgagaagagatgac

SEQ ID NO: 27701 - DNA, 20 bp, Artificial Sequence
  Description of Artificial Sequence: Synthetic oligonucleotide
  Target: PCSK9; (+) strand; PAM type: YTN; PAM sequence: CTG
agctgagaagagatgacaag

SEQ ID NO: 27702 - DNA, 20 bp, Artificial Sequence
  Description of Artificial Sequence: Synthetic oligonucleotide
  Target: PCSK9; (+) strand; PAM type: YTN; PAM sequence: CTG
agaagagatgacaaggacct

SEQ ID NO: 27703 - DNA, 20 bp, Artificial Sequence
  Description of Artificial Sequence: Synthetic oligonucleotide
  Target: PCSK9; (+) strand; PAM type: YTN; PAM sequence: CTT
gggcagaagcagggagactg

SEQ ID NO: 27704 - DNA, 20 bp, Artificial Sequence
  Description of Artificial Sequence: Synthetic oligonucleotide
  Target: PCSK9; (+) strand; PAM type: YTN; PAM sequence: TTG
ggcagaagcagggagactgg

SEQ ID NO: 27705 - DNA, 20 bp, Artificial Sequence
  Description of Artificial Sequence: Synthetic oligonucleotide
  Target: PCSK9; (+) strand; PAM type: YTN; PAM sequence: CTG
gagggaggcggtggagggtc

SEQ ID NO: 27706 - DNA, 20 bp, Artificial Sequence
  Description of Artificial Sequence: Synthetic oligonucleotide
  Target: PCSK9; (+) strand; PAM type: YTN; PAM sequence: TTG
gggcggggctcaggctggag

SEQ ID NO: 27707 - DNA, 20 bp, Artificial Sequence
  Description of Artificial Sequence: Synthetic oligonucleotide
  Target: PCSK9; (+) strand; PAM type: YTN; PAM sequence: CTC
aggctggagtctgaagggag

SEQ ID NO: 27708 - DNA, 20 bp, Artificial Sequence
  Description of Artificial Sequence: Synthetic oligonucleotide
  Target: PCSK9; (+) strand; PAM type: YTN; PAM sequence: CTG
gagtctgaagggagcctgca

SEQ ID NO: 27709 - DNA, 20 bp, Artificial Sequence
  Description of Artificial Sequence: Synthetic oligonucleotide
  Target: PCSK9; (+) strand; PAM type: YTN; PAM sequence: CTG
aagggagcctgcaggcctgg

SEQ ID NO: 27710 - DNA, 20 bp, Artificial Sequence
  Description of Artificial Sequence: Synthetic oligonucleotide
  Target: PCSK9; (+) strand; PAM type: YTN; PAM sequence: CTG
caggcctggtgggtggatgt

SEQ ID NO: 27711 - DNA, 20 bp, Artificial Sequence
  Description of Artificial Sequence: Synthetic oligonucleotide
  Target: PCSK9; (+) strand; PAM type: YTN; PAM sequence: CTG
gtgggtggatgtgggtggga

SEQ ID NO: 27712 - DNA, 20 bp, Artificial Sequence
  Description of Artificial Sequence: Synthetic oligonucleotide
  Target: PCSK9; (+) strand; PAM type: YTN; PAM sequence: CTC
gggcccctggacagatggag

SEQ ID NO: 27713 - DNA, 20 bp, Artificial Sequence
  Description of Artificial Sequence: Synthetic oligonucleotide
  Target: PCSK9; (+) strand; PAM type: YTN; PAM sequence: CTG
gacagatggagttgccatta

SEQ ID NO: 27714 - DNA, 20 bp, Artificial Sequence
  Description of Artificial Sequence: Synthetic oligonucleotide
  Target: PCSK9; (+) strand; PAM type: YTN; PAM sequence: TTG
ccattaagtgggatggggca

SEQ ID NO: 27715 - DNA, 20 bp, Artificial Sequence
  Description of Artificial Sequence: Synthetic oligonucleotide
  Target: PCSK9; (+) strand; PAM type: YTN; PAM sequence: TTA
agtgggatggggcaggctat

SEQ ID NO: 27716 - DNA, 20 bp, Artificial Sequence
  Description of Artificial Sequence: Synthetic oligonucleotide
  Target: PCSK9; (+) strand; PAM type: YTN; PAM sequence: CTA
tggggccatcagtttcagag

SEQ ID NO: 27717 - DNA, 20 bp, Artificial Sequence
  Description of Artificial Sequence: Synthetic oligonucleotide
  Target: PCSK9; (+) strand; PAM type: YTN; PAM sequence: TTT
cagagggatgagtttggcac

SEQ ID NO: 27718 - DNA, 20 bp, Artificial Sequence
  Description of Artificial Sequence: Synthetic oligonucleotide
  Target: PCSK9; (+) strand; PAM type: YTN; PAM sequence: TTC
agagggatgagtttggcact

SEQ ID NO: 27719 - DNA, 20 bp, Artificial Sequence
  Description of Artificial Sequence: Synthetic oligonucleotide
  Target: PCSK9; (+) strand; PAM type: YTN; PAM sequence: TTT
ggcactggcatggtaggcat

SEQ ID NO: 27720 - DNA, 20 bp, Artificial Sequence
  Description of Artificial Sequence: Synthetic oligonucleotide
  Target: PCSK9; (+) strand; PAM type: YTN; PAM sequence: TTG
gcactggcatggtaggcatc

SEQ ID NO: 27721 - DNA, 20 bp, Artificial Sequence
  Description of Artificial Sequence: Synthetic oligonucleotide
  Target: PCSK9; (+) strand; PAM type: YTN; PAM sequence: CTG
gcatggtaggcatctgtcta

SEQ ID NO: 27722 - DNA, 20 bp, Artificial Sequence
  Description of Artificial Sequence: Synthetic oligonucleotide
  Target: PCSK9; (+) strand; PAM type: YTN; PAM sequence: CTG
tctatctccacggccctcaa

SEQ ID NO: 27723 - DNA, 20 bp, Artificial Sequence
  Description of Artificial Sequence: Synthetic oligonucleotide
  Target: PCSK9; (+) strand; PAM type: YTN; PAM sequence: CTA
tctccacggccctcaaacca

SEQ ID NO: 27724 - DNA, 20 bp, Artificial Sequence
  Description of Artificial Sequence: Synthetic oligonucleotide
  Target: PCSK9; (+) strand; PAM type: YTN; PAM sequence: CTC
cacggccctcaaaccaggca

SEQ ID NO: 27725 - DNA, 20 bp, Artificial Sequence
  Description of Artificial Sequence: Synthetic oligonucleotide
  Target: PCSK9; (+) strand; PAM type: YTN; PAM sequence: CTC
aaaccaggcatgaagcagga

SEQ ID NO: 27726 - DNA, 20 bp, Artificial Sequence
  Description of Artificial Sequence: Synthetic oligonucleotide
  Target: PCSK9; (+) strand; PAM type: YTN; PAM sequence: CTC
acgtgtttggtcagccatgg

SEQ ID NO: 27727 - DNA, 20 bp, Artificial Sequence
  Description of Artificial Sequence: Synthetic oligonucleotide
  Target: PCSK9; (+) strand; PAM type: YTN; PAM sequence: TTT
ggtcagccatggtgcagaac

SEQ ID NO: 27728 - DNA, 20 bp, Artificial Sequence
  Description of Artificial Sequence: Synthetic oligonucleotide
  Target: PCSK9; (+) strand; PAM type: YTN; PAM sequence: TTG
gtcagccatggtgcagaacc

SEQ ID NO: 27729 - DNA, 20 bp, Artificial Sequence
  Description of Artificial Sequence: Synthetic oligonucleotide
  Target: PCSK9; (+) strand; PAM type: YTN; PAM sequence: CTG
ggtgggaggtgcggggtggg

SEQ ID NO: 27730 - DNA, 20 bp, Artificial Sequence
  Description of Artificial Sequence: Synthetic oligonucleotide
  Target: PCSK9; (+) strand; PAM type: YTN; PAM sequence: TTG
tgtcccaaatgggctctgag

SEQ ID NO: 27731 - DNA, 20 bp, Artificial Sequence
  Description of Artificial Sequence: Synthetic oligonucleotide
  Target: PCSK9; (+) strand; PAM type: YTN; PAM sequence: CTC
tgagccagcgagggccgtct

SEQ ID NO: 27732 - DNA, 20 bp, Artificial Sequence
  Description of Artificial Sequence: Synthetic oligonucleotide
  Target: PCSK9; (+) strand; PAM type: YTN; PAM sequence: CTG
agccagcgagggccgtctgc

SEQ ID NO: 27733 - DNA, 20 bp, Artificial Sequence
  Description of Artificial Sequence: Synthetic oligonucleotide
  Target: PCSK9; (+) strand; PAM type: YTN; PAM sequence: CTG
cactttggcctcacagaagg

SEQ ID NO: 27734 - DNA, 20 bp, Artificial Sequence
  Description of Artificial Sequence: Synthetic oligonucleotide
  Target: PCSK9; (+) strand; PAM type: YTN; PAM sequence: CTT
tggcctcacagaaggatgtc

SEQ ID NO: 27735 - DNA, 20 bp, Artificial Sequence
  Description of Artificial Sequence: Synthetic oligonucleotide
  Target: PCSK9; (+) strand; PAM type: YTN; PAM sequence: TTT
ggcctcacagaaggatgtcg

SEQ ID NO: 27736 - DNA, 20 bp, Artificial Sequence
  Description of Artificial Sequence: Synthetic oligonucleotide
  Target: PCSK9; (+) strand; PAM type: YTN; PAM sequence: TTG
gcctcacagaaggatgtcgg

SEQ ID NO: 27737 - DNA, 20 bp, Artificial Sequence
  Description of Artificial Sequence: Synthetic oligonucleotide
  Target: PCSK9; (+) strand; PAM type: YTN; PAM sequence: CTC
acagaaggatgtcggaggga

SEQ ID NO: 27738 - DNA, 20 bp, Artificial Sequence
  Description of Artificial Sequence: Synthetic oligonucleotide
  Target: PCSK9; (+) strand; PAM type: YTN; PAM sequence: CTA
gacatgtgctttcttttcct

SEQ ID NO: 27739 - DNA, 20 bp, Artificial Sequence
  Description of Artificial Sequence: Synthetic oligonucleotide
  Target: PCSK9; (+) strand; PAM type: YTN; PAM sequence: CTT
tcttttcctcgggctctggc

SEQ ID NO: 27740 - DNA, 20 bp, Artificial Sequence
  Description of Artificial Sequence: Synthetic oligonucleotide
  Target: PCSK9; (+) strand; PAM type: YTN; PAM sequence: TTT
cttttcctcgggctctggca

SEQ ID NO: 27741 - DNA, 20 bp, Artificial Sequence
  Description of Artificial Sequence: Synthetic oligonucleotide
  Target: PCSK9; (+) strand; PAM type: YTN; PAM sequence: TTC
ttttcctcgggctctggcag

SEQ ID NO: 27742 - DNA, 20 bp, Artificial Sequence
  Description of Artificial Sequence: Synthetic oligonucleotide
  Target: PCSK9; (+) strand; PAM type: YTN; PAM sequence: CTT
ttcctcgggctctggcaggt

SEQ ID NO: 27743 - DNA, 20 bp, Artificial Sequence
  Description of Artificial Sequence: Synthetic oligonucleotide
  Target: PCSK9; (+) strand; PAM type: YTN; PAM sequence: TTT
tcctcgggctctggcaggtg

SEQ ID NO: 27744 - DNA, 20 bp, Artificial Sequence
  Description of Artificial Sequence: Synthetic oligonucleotide
  Target: PCSK9; (+) strand; PAM type: YTN; PAM sequence: TTT
cctcgggctctggcaggtga

SEQ ID NO: 27745 - DNA, 20 bp, Artificial Sequence
  Description of Artificial Sequence: Synthetic oligonucleotide
  Target: PCSK9; (+) strand; PAM type: YTN; PAM sequence: TTC
ctcgggctctggcaggtgac

SEQ ID NO: 27746 - DNA, 20 bp, Artificial Sequence
  Description of Artificial Sequence: Synthetic oligonucleotide
  Target: PCSK9; (+) strand; PAM type: YTN; PAM sequence: CTC
gggctctggcaggtgaccgt

SEQ ID NO: 27747 - DNA, 20 bp, Artificial Sequence
  Description of Artificial Sequence: Synthetic oligonucleotide
  Target: PCSK9; (+) strand; PAM type: YTN; PAM sequence: CTC
tggcaggtgaccgtggcctg

SEQ ID NO: 27748 - DNA, 20 bp, Artificial Sequence
  Description of Artificial Sequence: Synthetic oligonucleotide
  Target: PCSK9; (+) strand; PAM type: YTN; PAM sequence: CTG
gcaggtgaccgtggcctgcg

SEQ ID NO: 27749 - DNA, 20 bp, Artificial Sequence
  Description of Artificial Sequence: Synthetic oligonucleotide
  Target: PCSK9; (+) strand; PAM type: YTN; PAM sequence: CTG
cgaggagggctggaccctga

SEQ ID NO: 27750 - DNA, 20 bp, Artificial Sequence
  Description of Artificial Sequence: Synthetic oligonucleotide
  Target: PCSK9; (+) strand; PAM type: YTN; PAM sequence: CTG
gaccctgactggctgcagtg

SEQ ID NO: 27751 - DNA, 20 bp, Artificial Sequence
  Description of Artificial Sequence: Synthetic oligonucleotide
  Target: PCSK9; (+) strand; PAM type: YTN; PAM sequence: CTG
actggctgcagtgccctccc

SEQ ID NO: 27752 - DNA, 20 bp, Artificial Sequence
  Description of Artificial Sequence: Synthetic oligonucleotide
  Target: PCSK9; (+) strand; PAM type: YTN; PAM sequence: CTG
gctgcagtgccctccctggg

SEQ ID NO: 27753 - DNA, 20 bp, Artificial Sequence
  Description of Artificial Sequence: Synthetic oligonucleotide
  Target: PCSK9; (+) strand; PAM type: YTN; PAM sequence: CTG
cagtgccctccctgggacct

SEQ ID NO: 27754 - DNA, 20 bp, Artificial Sequence
  Description of Artificial Sequence: Synthetic oligonucleotide
  Target: PCSK9; (+) strand; PAM type: YTN; PAM sequence: CTC
cctgggacctcccacgtcct

SEQ ID NO: 27755 - DNA, 20 bp, Artificial Sequence
  Description of Artificial Sequence: Synthetic oligonucleotide
  Target: PCSK9; (+) strand; PAM type: YTN; PAM sequence: CTG
ggacctcccacgtcctgggg

SEQ ID NO: 27756 - DNA, 20 bp, Artificial Sequence
  Description of Artificial Sequence: Synthetic oligonucleotide
  Target: PCSK9; (+) strand; PAM type: YTN; PAM sequence: CTC
ccacgtcctgggggcctacg

SEQ ID NO: 27757 - DNA, 20 bp, Artificial Sequence
  Description of Artificial Sequence: Synthetic oligonucleotide
  Target: PCSK9; (+) strand; PAM type: YTN; PAM sequence: CTG
ggggcctacgccgtagacaa

SEQ ID NO: 27758 - DNA, 20 bp, Artificial Sequence
  Description of Artificial Sequence: Synthetic oligonucleotide
  Target: PCSK9; (+) strand; PAM type: YTN; PAM sequence: CTA
cgccgtagacaacacgtgtg

SEQ ID NO: 27759 - DNA, 20 bp, Artificial Sequence
  Description of Artificial Sequence: Synthetic oligonucleotide
  Target: PCSK9; (+) strand; PAM type: YTN; PAM sequence: CTA
caggcagcaccagcgaaggg

SEQ ID NO: 27760 - DNA, 20 bp, Artificial Sequence
  Description of Artificial Sequence: Synthetic oligonucleotide
  Target: PCSK9; (+) strand; PAM type: YTN; PAM sequence: TTG
ccatctgctgccggagccgg

SEQ ID NO: 27761 - DNA, 20 bp, Artificial Sequence
  Description of Artificial Sequence: Synthetic oligonucleotide
  Target: PCSK9; (+) strand; PAM type: YTN; PAM sequence: CTG
ctgccggagccggcacctgg

SEQ ID NO: 27762 - DNA, 20 bp, Artificial Sequence
  Description of Artificial Sequence: Synthetic oligonucleotide
  Target: PCSK9; (+) strand; PAM type: YTN; PAM sequence: CTG
ccggagccggcacctggcgc

SEQ ID NO: 27763 - DNA, 20 bp, Artificial Sequence
  Description of Artificial Sequence: Synthetic oligonucleotide
  Target: PCSK9; (+) strand; PAM type: YTN; PAM sequence: CTG
gcgcaggcctcccaggagct

SEQ ID NO: 27764 - DNA, 20 bp, Artificial Sequence
  Description of Artificial Sequence: Synthetic oligonucleotide
  Target: PCSK9; (+) strand; PAM type: YTN; PAM sequence: CTC
ccaggagctccagtgacagc

SEQ ID NO: 27765 - DNA, 20 bp, Artificial Sequence
  Description of Artificial Sequence: Synthetic oligonucleotide
  Target: PCSK9; (+) strand; PAM type: YTN; PAM sequence: CTC
cagtgacagccccatcccag

SEQ ID NO: 27766 - DNA, 20 bp, Artificial Sequence
  Description of Artificial Sequence: Synthetic oligonucleotide
  Target: PCSK9; (+) strand; PAM type: YTN; PAM sequence: CTG
gggagggtcaagggctgggg

SEQ ID NO: 27767 - DNA, 20 bp, Artificial Sequence
  Description of Artificial Sequence: Synthetic oligonucleotide
  Target: PCSK9; (+) strand; PAM type: YTN; PAM sequence: CTG
gggctgagctttaaaatggt

SEQ ID NO: 27768 - DNA, 20 bp, Artificial Sequence
  Description of Artificial Sequence: Synthetic oligonucleotide
  Target: PCSK9; (+) strand; PAM type: YTN; PAM sequence: CTG
agctttaaaatggttccgac

SEQ ID NO: 27769 - DNA, 20 bp, Artificial Sequence
  Description of Artificial Sequence: Synthetic oligonucleotide
  Target: PCSK9; (+) strand; PAM type: YTN; PAM sequence: CTT
taaaatggttccgacttgtc

SEQ ID NO: 27770 - DNA, 20 bp, Artificial Sequence
  Description of Artificial Sequence: Synthetic oligonucleotide
  Target: PCSK9; (+) strand; PAM type: YTN; PAM sequence: TTT
aaaatggttccgacttgtcc

SEQ ID NO: 27771 - DNA, 20 bp, Artificial Sequence
  Description of Artificial Sequence: Synthetic oligonucleotide
  Target: PCSK9; (+) strand; PAM type: YTN; PAM sequence: TTA
aaatggttccgacttgtccc

SEQ ID NO: 27772 - DNA, 20 bp, Artificial Sequence
  Description of Artificial Sequence: Synthetic oligonucleotide
  Target: PCSK9; (+) strand; PAM type: YTN; PAM sequence: TTC
cgacttgtccctctctcagc

SEQ ID NO: 27773 - DNA, 20 bp, Artificial Sequence
  Description of Artificial Sequence: Synthetic oligonucleotide
  Target: PCSK9; (+) strand; PAM type: YTN; PAM sequence: CTT
gtccctctctcagccctcca

SEQ ID NO: 27774 - DNA, 20 bp, Artificial Sequence
  Description of Artificial Sequence: Synthetic oligonucleotide
  Target: PCSK9; (+) strand; PAM type: YTN; PAM sequence: TTG
tccctctctcagccctccat

SEQ ID NO: 27775 - DNA, 20 bp, Artificial Sequence
  Description of Artificial Sequence: Synthetic oligonucleotide
  Target: PCSK9; (+) strand; PAM type: YTN; PAM sequence: CTC
tctcagccctccatggcctg

SEQ ID NO: 27776 - DNA, 20 bp, Artificial Sequence
  Description of Artificial Sequence: Synthetic oligonucleotide
  Target: PCSK9; (+) strand; PAM type: YTN; PAM sequence: CTC
tcagccctccatggcctggc

SEQ ID NO: 27777 - DNA, 20 bp, Artificial Sequence
  Description of Artificial Sequence: Synthetic oligonucleotide
  Target: PCSK9; (+) strand; PAM type: YTN; PAM sequence: CTC
agccctccatggcctggcac

SEQ ID NO: 27778 - DNA, 20 bp, Artificial Sequence
  Description of Artificial Sequence: Synthetic oligonucleotide
  Target: PCSK9; (+) strand; PAM type: YTN; PAM sequence: CTC
catggcctggcacgagggga

SEQ ID NO: 27779 - DNA, 20 bp, Artificial Sequence
  Description of Artificial Sequence: Synthetic oligonucleotide
  Target: PCSK9; (+) strand; PAM type: YTN; PAM sequence: CTG
gcacgaggggatggggatgc

SEQ ID NO: 27780 - DNA, 20 bp, Artificial Sequence
  Description of Artificial Sequence: Synthetic oligonucleotide
  Target: PCSK9; (+) strand; PAM type: YTN; PAM sequence: CTT
ccgcctttccggggctgctg

SEQ ID NO: 27781 - DNA, 20 bp, Artificial Sequence
  Description of Artificial Sequence: Synthetic oligonucleotide
  Target: PCSK9; (+) strand; PAM type: YTN; PAM sequence: TTC
cgcctttccggggctgctgg

SEQ ID NO: 27782 - DNA, 20 bp, Artificial Sequence
  Description of Artificial Sequence: Synthetic oligonucleotide
  Target: PCSK9; (+) strand; PAM type: YTN; PAM sequence: CTT
tccggggctgctggcctggc

SEQ ID NO: 27783 - DNA, 20 bp, Artificial Sequence
  Description of Artificial Sequence: Synthetic oligonucleotide
  Target: PCSK9; (+) strand; PAM type: YTN; PAM sequence: TTT
ccggggctgctggcctggcc

SEQ ID NO: 27784 - DNA, 20 bp, Artificial Sequence
  Description of Artificial Sequence: Synthetic oligonucleotide
  Target: PCSK9; (+) strand; PAM type: YTN; PAM sequence: TTC
cggggctgctggcctggccc

SEQ ID NO: 27785 - DNA, 20 bp, Artificial Sequence
  Description of Artificial Sequence: Synthetic oligonucleotide
  Target: PCSK9; (+) strand; PAM type: YTN; PAM sequence: CTG
ctggcctggcccttgagtgg

SEQ ID NO: 27786 - DNA, 20 bp, Artificial Sequence
  Description of Artificial Sequence: Synthetic oligonucleotide
  Target: PCSK9; (+) strand; PAM type: YTN; PAM sequence: CTG
gcctggcccttgagtggggc

SEQ ID NO: 27787 - DNA, 20 bp, Artificial Sequence
  Description of Artificial Sequence: Synthetic oligonucleotide
  Target: PCSK9; (+) strand; PAM type: YTN; PAM sequence: CTG
gcccttgagtggggcagcct

SEQ ID NO: 27788 - DNA, 20 bp, Artificial Sequence
  Description of Artificial Sequence: Synthetic oligonucleotide
  Target: PCSK9; (+) strand; PAM type: YTN; PAM sequence: CTT
gagtggggcagcctccttgc

SEQ ID NO: 27789 - DNA, 20 bp, Artificial Sequence
  Description of Artificial Sequence: Synthetic oligonucleotide
  Target: PCSK9; (+) strand; PAM type: YTN; PAM sequence: TTG
agtggggcagcctccttgcc

SEQ ID NO: 27790 - DNA, 20 bp, Artificial Sequence
  Description of Artificial Sequence: Synthetic oligonucleotide
  Target: PCSK9; (+) strand; PAM type: YTN; PAM sequence: CTC
cttgcctggaactcactcac

SEQ ID NO: 27791 - DNA, 20 bp, Artificial Sequence
  Description of Artificial Sequence: Synthetic oligonucleotide
  Target: PCSK9; (+) strand; PAM type: YTN; PAM sequence: CTT
gcctggaactcactcactct

SEQ ID NO: 27792 - DNA, 20 bp, Artificial Sequence
  Description of Artificial Sequence: Synthetic oligonucleotide
  Target: PCSK9; (+) strand; PAM type: YTN; PAM sequence: TTG
cctggaactcactcactctg

SEQ ID NO: 27793 - DNA, 20 bp, Artificial Sequence
  Description of Artificial Sequence: Synthetic oligonucleotide
  Target: PCSK9; (+) strand; PAM type: YTN; PAM sequence: CTG
gaactcactcactctgggtg

SEQ ID NO: 27794 - DNA, 20 bp, Artificial Sequence
  Description of Artificial Sequence: Synthetic oligonucleotide
  Target: PCSK9; (+) strand; PAM type: YTN; PAM sequence: CTC
actcactctgggtgcctcct

SEQ ID NO: 27795 - DNA, 20 bp, Artificial Sequence
  Description of Artificial Sequence: Synthetic oligonucleotide
  Target: PCSK9; (+) strand; PAM type: YTN; PAM sequence: CTC
actctgggtgcctcctcccc

SEQ ID NO: 27796 - DNA, 20 bp, Artificial Sequence
  Description of Artificial Sequence: Synthetic oligonucleotide
  Target: PCSK9; (+) strand; PAM type: YTN; PAM sequence: CTC
tgggtgcctcctccccaggt

SEQ ID NO: 27797 - DNA, 20 bp, Artificial Sequence
  Description of Artificial Sequence: Synthetic oligonucleotide
  Target: PCSK9; (+) strand; PAM type: YTN; PAM sequence: CTG
ggtgcctcctccccaggtgg

SEQ ID NO: 27798 - DNA, 20 bp, Artificial Sequence
  Description of Artificial Sequence: Synthetic oligonucleotide
  Target: PCSK9; (+) strand; PAM type: YTN; PAM sequence: CTC
ctccccaggtggaggtgcca

SEQ ID NO: 27799 - DNA, 20 bp, Artificial Sequence
  Description of Artificial Sequence: Synthetic oligonucleotide
  Target: PCSK9; (+) strand; PAM type: YTN; PAM sequence: CTC
cccaggtggaggtgccagga

SEQ ID NO: 27800 - DNA, 20 bp, Artificial Sequence
  Description of Artificial Sequence: Synthetic oligonucleotide
  Target: PCSK9; (+) strand; PAM type: YTN; PAM sequence: CTC
cctccctcactgtggggcat

SEQ ID NO: 27801 - DNA, 20 bp, Artificial Sequence
  Description of Artificial Sequence: Synthetic oligonucleotide
  Target: PCSK9; (+) strand; PAM type: YTN; PAM sequence: CTC
cctcactgtggggcatttca

SEQ ID NO: 27802 - DNA, 20 bp, Artificial Sequence
  Description of Artificial Sequence: Synthetic oligonucleotide
  Target: PCSK9; (+) strand; PAM type: YTN; PAM sequence: CTC
actgtggggcatttcaccat

SEQ ID NO: 27803 - DNA, 20 bp, Artificial Sequence
  Description of Artificial Sequence: Synthetic oligonucleotide
  Target: PCSK9; (+) strand; PAM type: YTN; PAM sequence: CTG
tggggcatttcaccattcaa

SEQ ID NO: 27804 - DNA, 20 bp, Artificial Sequence
  Description of Artificial Sequence: Synthetic oligonucleotide
  Target: PCSK9; (+) strand; PAM type: YTN; PAM sequence: TTT
caccattcaaacaggtcgag

SEQ ID NO: 27805 - DNA, 20 bp, Artificial Sequence
  Description of Artificial Sequence: Synthetic oligonucleotide
  Target: PCSK9; (+) strand; PAM type: YTN; PAM sequence: TTC
accattcaaacaggtcgagc

SEQ ID NO: 27806 - DNA, 20 bp, Artificial Sequence
  Description of Artificial Sequence: Synthetic oligonucleotide
  Target: PCSK9; (+) strand; PAM type: YTN; PAM sequence: TTC
aaacaggtcgagctgtgctc

SEQ ID NO: 27807 - DNA, 20 bp, Artificial Sequence
  Description of Artificial Sequence: Synthetic oligonucleotide
  Target: PCSK9; (+) strand; PAM type: YTN; PAM sequence: CTG
tgctcgggtgctgccagctg

SEQ ID NO: 27808 - DNA, 20 bp, Artificial Sequence
  Description of Artificial Sequence: Synthetic oligonucleotide
  Target: PCSK9; (+) strand; PAM type: YTN; PAM sequence: CTC
gggtgctgccagctgctccc

SEQ ID NO: 27809 - DNA, 20 bp, Artificial Sequence
  Description of Artificial Sequence: Synthetic oligonucleotide
  Target: PCSK9; (+) strand; PAM type: YTN; PAM sequence: CTG
ccagctgctcccaatgtgcc

SEQ ID NO: 27810 - DNA, 20 bp, Artificial Sequence
  Description of Artificial Sequence: Synthetic oligonucleotide
  Target: PCSK9; (+) strand; PAM type: YTN; PAM sequence: CTG
ctcccaatgtgccgatgtcc

SEQ ID NO: 27811 - DNA, 20 bp, Artificial Sequence
  Description of Artificial Sequence: Synthetic oligonucleotide
  Target: PCSK9; (+) strand; PAM type: YTN; PAM sequence: CTC
ccaatgtgccgatgtccgtg

SEQ ID NO: 27812 - DNA, 20 bp, Artificial Sequence
  Description of Artificial Sequence: Synthetic oligonucleotide
  Target: PCSK9; (+) strand; PAM type: YTN; PAM sequence: CTT
ttattgagctcttgttccgt

SEQ ID NO: 27813 - DNA, 20 bp, Artificial Sequence
  Description of Artificial Sequence: Synthetic oligonucleotide
  Target: PCSK9; (+) strand; PAM type: YTN; PAM sequence: TTT
tattgagctcttgttccgtg

SEQ ID NO: 27814 - DNA, 20 bp, Artificial Sequence
  Description of Artificial Sequence: Synthetic oligonucleotide
  Target: PCSK9; (+) strand; PAM type: YTN; PAM sequence: TTT
attgagctcttgttccgtgc

SEQ ID NO: 27815 - DNA, 20 bp, Artificial Sequence
  Description of Artificial Sequence: Synthetic oligonucleotide
  Target: PCSK9; (+) strand; PAM type: YTN; PAM sequence: TTA
ttgagctcttgttccgtgcc

SEQ ID NO: 27816 - DNA, 20 bp, Artificial Sequence
  Description of Artificial Sequence: Synthetic oligonucleotide
  Target: PCSK9; (+) strand; PAM type: YTN; PAM sequence: TTG
agctcttgttccgtgccagg

SEQ ID NO: 27817 - DNA, 20 bp, Artificial Sequence
  Description of Artificial Sequence: Synthetic oligonucleotide
  Target: PCSK9; (+) strand; PAM type: YTN; PAM sequence: CTC
ttgttccgtgccaggcattc

SEQ ID NO: 27818 - DNA, 20 bp, Artificial Sequence
  Description of Artificial Sequence: Synthetic oligonucleotide
  Target: PCSK9; (+) strand; PAM type: YTN; PAM sequence: CTT
gttccgtgccaggcattcaa

SEQ ID NO: 27819 - DNA, 20 bp, Artificial Sequence
  Description of Artificial Sequence: Synthetic oligonucleotide
  Target: PCSK9; (+) strand; PAM type: YTN; PAM sequence: TTG
ttccgtgccaggcattcaat

SEQ ID NO: 27820 - DNA, 20 bp, Artificial Sequence
  Description of Artificial Sequence: Synthetic oligonucleotide
  Target: PCSK9; (+) strand; PAM type: YTN; PAM sequence: TTC
cgtgccaggcattcaatcct

SEQ ID NO: 27821 - DNA, 20 bp, Artificial Sequence
  Description of Artificial Sequence: Synthetic oligonucleotide
  Target: PCSK9; (+) strand; PAM type: YTN; PAM sequence: TTC
aatcctcaggtctccaccaa

SEQ ID NO: 27822 - DNA, 20 bp, Artificial Sequence
  Description of Artificial Sequence: Synthetic oligonucleotide
  Target: PCSK9; (+) strand; PAM type: YTN; PAM sequence: CTC
aggtctccaccaaggaggca

SEQ ID NO: 27823 - DNA, 20 bp, Artificial Sequence
  Description of Artificial Sequence: Synthetic oligonucleotide
  Target: PCSK9; (+) strand; PAM type: YTN; PAM sequence: CTC
caccaaggaggcaggattct

SEQ ID NO: 27824 - DNA, 20 bp, Artificial Sequence
  Description of Artificial Sequence: Synthetic oligonucleotide
  Target: PCSK9; (+) strand; PAM type: YTN; PAM sequence: TTC
ttcccatggataggggaggg

SEQ ID NO: 27825 - DNA, 20 bp, Artificial Sequence
  Description of Artificial Sequence: Synthetic oligonucleotide
  Target: PCSK9; (+) strand; PAM type: YTN; PAM sequence: CTT
cccatggataggggaggggg

SEQ ID NO: 27826 - DNA, 20 bp, Artificial Sequence
  Description of Artificial Sequence: Synthetic oligonucleotide
  Target: PCSK9; (+) strand; PAM type: YTN; PAM sequence: TTC
ccatggataggggagggggc

SEQ ID NO: 27827 - DNA, 20 bp, Artificial Sequence
  Description of Artificial Sequence: Synthetic oligonucleotide
  Target: PCSK9; (+) strand; PAM type: YTN; PAM sequence: CTG
cagggacaaacatcgttggg

SEQ ID NO: 27828 - DNA, 20 bp, Artificial Sequence
  Description of Artificial Sequence: Synthetic oligonucleotide
  Target: PCSK9; (+) strand; PAM type: YTN; PAM sequence: TTG
gggggtgagtgtgaaaggtg

SEQ ID NO: 27829 - DNA, 20 bp, Artificial Sequence
  Description of Artificial Sequence: Synthetic oligonucleotide
  Target: PCSK9; (+) strand; PAM type: YTN; PAM sequence: CTG
atggccctcatctccagcta

SEQ ID NO: 27830 - DNA, 20 bp, Artificial Sequence
  Description of Artificial Sequence: Synthetic oligonucleotide
  Target: PCSK9; (+) strand; PAM type: YTN; PAM sequence: CTC
atctccagctaactgtggag

SEQ ID NO: 27831 - DNA, 20 bp, Artificial Sequence
  Description of Artificial Sequence: Synthetic oligonucleotide
  Target: PCSK9; (+) strand; PAM type: YTN; PAM sequence: CTC
cagctaactgtggagaagcc

SEQ ID NO: 27832 - DNA, 20 bp, Artificial Sequence
  Description of Artificial Sequence: Synthetic oligonucleotide
  Target: PCSK9; (+) strand; PAM type: YTN; PAM sequence: CTA
actgtggagaagcccctggg

SEQ ID NO: 27833 - DNA, 20 bp, Artificial Sequence
  Description of Artificial Sequence: Synthetic oligonucleotide
  Target: PCSK9; (+) strand; PAM type: YTN; PAM sequence: CTG
tggagaagcccctgggggct

SEQ ID NO: 27834 - DNA, 20 bp, Artificial Sequence
  Description of Artificial Sequence: Synthetic oligonucleotide
  Target: PCSK9; (+) strand; PAM type: YTN; PAM sequence: CTG
ggggctccctgattaatgga

SEQ ID NO: 27835 - DNA, 20 bp, Artificial Sequence
  Description of Artificial Sequence: Synthetic oligonucleotide
  Target: PCSK9; (+) strand; PAM type: YTN; PAM sequence: CTC
cctgattaatggaggcttag

SEQ ID NO: 27836 - DNA, 20 bp, Artificial Sequence
  Description of Artificial Sequence: Synthetic oligonucleotide
  Target: PCSK9; (+) strand; PAM type: YTN; PAM sequence: CTG
attaatggaggcttagcttt

SEQ ID NO: 27837 - DNA, 20 bp, Artificial Sequence
  Description of Artificial Sequence: Synthetic oligonucleotide
  Target: PCSK9; (+) strand; PAM type: YTN; PAM sequence: TTA
atggaggcttagctttctgg

SEQ ID NO: 27838 - DNA, 20 bp, Artificial Sequence
  Description of Artificial Sequence: Synthetic oligonucleotide
  Target: PCSK9; (+) strand; PAM type: YTN; PAM sequence: CTT
agctttctggatggcatcta

SEQ ID NO: 27839 - DNA, 20 bp, Artificial Sequence
  Description of Artificial Sequence: Synthetic oligonucleotide
  Target: PCSK9; (+) strand; PAM type: YTN; PAM sequence: TTA
gctttctggatggcatctag

SEQ ID NO: 27840 - DNA, 20 bp, Artificial Sequence
  Description of Artificial Sequence: Synthetic oligonucleotide
  Target: PCSK9; (+) strand; PAM type: YTN; PAM sequence: CTT
tctggatggcatctagccag

SEQ ID NO: 27841 - DNA, 20 bp, Artificial Sequence
  Description of Artificial Sequence: Synthetic oligonucleotide
  Target: PCSK9; (+) strand; PAM type: YTN; PAM sequence: TTT
ctggatggcatctagccaga

SEQ ID NO: 27842 - DNA, 20 bp, Artificial Sequence
  Description of Artificial Sequence: Synthetic oligonucleotide
  Target: PCSK9; (+) strand; PAM type: YTN; PAM sequence: TTC
tggatggcatctagccagag

SEQ ID NO: 27843 - DNA, 20 bp, Artificial Sequence
  Description of Artificial Sequence: Synthetic oligonucleotide
  Target: PCSK9; (+) strand; PAM type: YTN; PAM sequence: CTG
gatggcatctagccagaggc

SEQ ID NO: 27844 - DNA, 20 bp, Artificial Sequence
  Description of Artificial Sequence: Synthetic oligonucleotide
  Target: PCSK9; (+) strand; PAM type: YTN; PAM sequence: CTA
gccagaggctggagacaggt

SEQ ID NO: 27845 - DNA, 20 bp, Artificial Sequence
  Description of Artificial Sequence: Synthetic oligonucleotide
  Target: PCSK9; (+) strand; PAM type: YTN; PAM sequence: CTG
gagacaggtgcgcccctggt

SEQ ID NO: 27846 - DNA, 20 bp, Artificial Sequence
  Description of Artificial Sequence: Synthetic oligonucleotide
  Target: PCSK9; (+) strand; PAM type: YTN; PAM sequence: CTG
gtggtcacaggctgtgcctt

SEQ ID NO: 27847 - DNA, 20 bp, Artificial Sequence
  Description of Artificial Sequence: Synthetic oligonucleotide
  Target: PCSK9; (+) strand; PAM type: YTN; PAM sequence: CTG
tgccttggtttcctgagcca

SEQ ID NO: 27848 - DNA, 20 bp, Artificial Sequence
  Description of Artificial Sequence: Synthetic oligonucleotide
  Target: PCSK9; (+) strand; PAM type: YTN; PAM sequence: CTT
ggtttcctgagccaccttta

SEQ ID NO: 27849 - DNA, 20 bp, Artificial Sequence
  Description of Artificial Sequence: Synthetic oligonucleotide
  Target: PCSK9; (+) strand; PAM type: YTN; PAM sequence: TTG
gtttcctgagccacctttac

SEQ ID NO: 27850 - DNA, 20 bp, Artificial Sequence
  Description of Artificial Sequence: Synthetic oligonucleotide
  Target: PCSK9; (+) strand; PAM type: YTN; PAM sequence: TTT
cctgagccacctttactctg

SEQ ID NO: 27851 - DNA, 20 bp, Artificial Sequence
  Description of Artificial Sequence: Synthetic oligonucleotide
  Target: PCSK9; (+) strand; PAM type: YTN; PAM sequence: TTC
ctgagccacctttactctgc

SEQ ID NO: 27852 - DNA, 20 bp, Artificial Sequence
  Description of Artificial Sequence: Synthetic oligonucleotide
  Target: PCSK9; (+) strand; PAM type: YTN; PAM sequence: CTG
agccacctttactctgctct

SEQ ID NO: 27853 - DNA, 20 bp, Artificial Sequence
  Description of Artificial Sequence: Synthetic oligonucleotide
  Target: PCSK9; (+) strand; PAM type: YTN; PAM sequence: CTT
tactctgctctatgccaggc

SEQ ID NO: 27854 - DNA, 20 bp, Artificial Sequence
  Description of Artificial Sequence: Synthetic oligonucleotide
  Target: PCSK9; (+) strand; PAM type: YTN; PAM sequence: TTT
actctgctctatgccaggct

SEQ ID NO: 27855 - DNA, 20 bp, Artificial Sequence
  Description of Artificial Sequence: Synthetic oligonucleotide
  Target: PCSK9; (+) strand; PAM type: YTN; PAM sequence: TTA
ctctgctctatgccaggctg

SEQ ID NO: 27856 - DNA, 20 bp, Artificial Sequence
  Description of Artificial Sequence: Synthetic oligonucleotide
  Target: PCSK9; (+) strand; PAM type: YTN; PAM sequence: CTC
tgctctatgccaggctgtgc

SEQ ID NO: 27857 - DNA, 20 bp, Artificial Sequence
  Description of Artificial Sequence: Synthetic oligonucleotide
  Target: PCSK9; (+) strand; PAM type: YTN; PAM sequence: CTG
ctctatgccaggctgtgcta

SEQ ID NO: 27858 - DNA, 20 bp, Artificial Sequence
  Description of Artificial Sequence: Synthetic oligonucleotide
  Target: PCSK9; (+) strand; PAM type: YTN; PAM sequence: CTC
tatgccaggctgtgctagca

SEQ ID NO: 27859 - DNA, 20 bp, Artificial Sequence
  Description of Artificial Sequence: Synthetic oligonucleotide
  Target: PCSK9; (+) strand; PAM type: YTN; PAM sequence: CTA
tgccaggctgtgctagcaac

SEQ ID NO: 27860 - DNA, 20 bp, Artificial Sequence
  Description of Artificial Sequence: Synthetic oligonucleotide
  Target: PCSK9; (+) strand; PAM type: YTN; PAM sequence: CTG
tgctagcaacacccaaaggt

SEQ ID NO: 27861 - DNA, 20 bp, Artificial Sequence
  Description of Artificial Sequence: Synthetic oligonucleotide
  Target: PCSK9; (+) strand; PAM type: YTN; PAM sequence: CTA
gcaacacccaaaggtggcct

SEQ ID NO: 27862 - DNA, 20 bp, Artificial Sequence
  Description of Artificial Sequence: Synthetic oligonucleotide
  Target: PCSK9; (+) strand; PAM type: YTN; PAM sequence: CTG
cggggagccatcacctagga

SEQ ID NO: 27863 - DNA, 20 bp, Artificial Sequence
  Description of Artificial Sequence: Synthetic oligonucleotide
  Target: PCSK9; (+) strand; PAM type: YTN; PAM sequence: CTA
ggactgactcggcagtgtgc

SEQ ID NO: 27864 - DNA, 20 bp, Artificial Sequence
  Description of Artificial Sequence: Synthetic oligonucleotide
  Target: PCSK9; (+) strand; PAM type: YTN; PAM sequence: CTG
actcggcagtgtgcagtggt

SEQ ID NO: 27865 - DNA, 20 bp, Artificial Sequence
  Description of Artificial Sequence: Synthetic oligonucleotide
  Target: PCSK9; (+) strand; PAM type: YTN; PAM sequence: CTC
ggcagtgtgcagtggtgcat

SEQ ID NO: 27866 - DNA, 20 bp, Artificial Sequence
  Description of Artificial Sequence: Synthetic oligonucleotide
  Target: PCSK9; (+) strand; PAM type: YTN; PAM sequence: CTG
tctcagccaacccgctccac

SEQ ID NO: 27867 - DNA, 20 bp, Artificial Sequence
  Description of Artificial Sequence: Synthetic oligonucleotide
  Target: PCSK9; (+) strand; PAM type: YTN; PAM sequence: CTC
agccaacccgctccactacc

SEQ ID NO: 27868 - DNA, 20 bp, Artificial Sequence
  Description of Artificial Sequence: Synthetic oligonucleotide
  Target: PCSK9; (+) strand; PAM type: YTN; PAM sequence: CTC
cactacccggcagggtacac

SEQ ID NO: 27869 - DNA, 20 bp, Artificial Sequence
  Description of Artificial Sequence: Synthetic oligonucleotide
  Target: PCSK9; (+) strand; PAM type: YTN; PAM sequence: CTA
cccggcagggtacacattcg

SEQ ID NO: 27870 - DNA, 20 bp, Artificial Sequence
  Description of Artificial Sequence: Synthetic oligonucleotide
  Target: PCSK9; (+) strand; PAM type: YTN; PAM sequence: TTC
gcacccctacttcacagagg

SEQ ID NO: 27871 - DNA, 20 bp, Artificial Sequence
  Description of Artificial Sequence: Synthetic oligonucleotide
  Target: PCSK9; (+) strand; PAM type: YTN; PAM sequence: CTA
cttcacagaggaagaaacct

SEQ ID NO: 27872 - DNA, 20 bp, Artificial Sequence
  Description of Artificial Sequence: Synthetic oligonucleotide
  Target: PCSK9; (+) strand; PAM type: YTN; PAM sequence: CTT
cacagaggaagaaacctgga

SEQ ID NO: 27873 - DNA, 20 bp, Artificial Sequence
  Description of Artificial Sequence: Synthetic oligonucleotide
  Target: PCSK9; (+) strand; PAM type: YTN; PAM sequence: TTC
acagaggaagaaacctggaa

SEQ ID NO: 27874 - DNA, 20 bp, Artificial Sequence
  Description of Artificial Sequence: Synthetic oligonucleotide
  Target: PCSK9; (+) strand; PAM type: YTN; PAM sequence: CTG
gaaccagagggggcgtgcct

SEQ ID NO: 27875 - DNA, 20 bp, Artificial Sequence
  Description of Artificial Sequence: Synthetic oligonucleotide
  Target: PCSK9; (+) strand; PAM type: YTN; PAM sequence: CTG
ccaagctcacacagcaggaa

SEQ ID NO: 27876 - DNA, 20 bp, Artificial Sequence
  Description of Artificial Sequence: Synthetic oligonucleotide
  Target: PCSK9; (+) strand; PAM type: YTN; PAM sequence: CTC
acacagcaggaactgagcca

SEQ ID NO: 27877 - DNA, 20 bp, Artificial Sequence
  Description of Artificial Sequence: Synthetic oligonucleotide
  Target: PCSK9; (+) strand; PAM type: YTN; PAM sequence: CTG
agccagaaacgcagattggg

SEQ ID NO: 27878 - DNA, 20 bp, Artificial Sequence
  Description of Artificial Sequence: Synthetic oligonucleotide
  Target: PCSK9; (+) strand; PAM type: YTN; PAM sequence: TTG
ggctggctctgaagccaagc

SEQ ID NO: 27879 - DNA, 20 bp, Artificial Sequence
  Description of Artificial Sequence: Synthetic oligonucleotide
  Target: PCSK9; (+) strand; PAM type: YTN; PAM sequence: CTG
gctctgaagccaagcctctt

SEQ ID NO: 27880 - DNA, 20 bp, Artificial Sequence
  Description of Artificial Sequence: Synthetic oligonucleotide
  Target: PCSK9; (+) strand; PAM type: YTN; PAM sequence: CTC
tgaagccaagcctcttctta

SEQ ID NO: 27881 - DNA, 20 bp, Artificial Sequence
  Description of Artificial Sequence: Synthetic oligonucleotide
  Target: PCSK9; (+) strand; PAM type: YTN; PAM sequence: CTG
aagccaagcctcttcttact

SEQ ID NO: 27882 - DNA, 20 bp, Artificial Sequence
  Description of Artificial Sequence: Synthetic oligonucleotide
  Target: PCSK9; (+) strand; PAM type: YTN; PAM sequence: CTC
ttcttacttcacccggctgg

SEQ ID NO: 27883 - DNA, 20 bp, Artificial Sequence
  Description of Artificial Sequence: Synthetic oligonucleotide
  Target: PCSK9; (+) strand; PAM type: YTN; PAM sequence: CTT
cttacttcacccggctgggc

SEQ ID NO: 27884 - DNA, 20 bp, Artificial Sequence
  Description of Artificial Sequence: Synthetic oligonucleotide
  Target: PCSK9; (+) strand; PAM type: YTN; PAM sequence: TTC
ttacttcacccggctgggct

SEQ ID NO: 27885 - DNA, 20 bp, Artificial Sequence
  Description of Artificial Sequence: Synthetic oligonucleotide
  Target: PCSK9; (+) strand; PAM type: YTN; PAM sequence: CTT
acttcacccggctgggctcc

SEQ ID NO: 27886 - DNA, 20 bp, Artificial Sequence
  Description of Artificial Sequence: Synthetic oligonucleotide
  Target: PCSK9; (+) strand; PAM type: YTN; PAM sequence: TTA
cttcacccggctgggctcct

SEQ ID NO: 27887 - DNA, 20 bp, Artificial Sequence
  Description of Artificial Sequence: Synthetic oligonucleotide
  Target: PCSK9; (+) strand; PAM type: YTN; PAM sequence: CTT
cacccggctgggctcctcat

SEQ ID NO: 27888 - DNA, 20 bp, Artificial Sequence
  Description of Artificial Sequence: Synthetic oligonucleotide
  Target: PCSK9; (+) strand; PAM type: YTN; PAM sequence: TTC
acccggctgggctcctcatt

SEQ ID NO: 27889 - DNA, 20 bp, Artificial Sequence
  Description of Artificial Sequence: Synthetic oligonucleotide
  Target: PCSK9; (+) strand; PAM type: YTN; PAM sequence: CTG
ggctcctcatttttacgggt

SEQ ID NO: 27890 - DNA, 20 bp, Artificial Sequence
  Description of Artificial Sequence: Synthetic oligonucleotide
  Target: PCSK9; (+) strand; PAM type: YTN; PAM sequence: CTC
ctcatttttacgggtaacag

SEQ ID NO: 27891 - DNA, 20 bp, Artificial Sequence
  Description of Artificial Sequence: Synthetic oligonucleotide
  Target: PCSK9; (+) strand; PAM type: YTN; PAM sequence: CTC
atttttacgggtaacagtga

SEQ ID NO: 27892 - DNA, 20 bp, Artificial Sequence
  Description of Artificial Sequence: Synthetic oligonucleotide
  Target: PCSK9; (+) strand; PAM type: YTN; PAM sequence: TTT
ttacgggtaacagtgaggct

SEQ ID NO: 27893 - DNA, 20 bp, Artificial Sequence
  Description of Artificial Sequence: Synthetic oligonucleotide
  Target: PCSK9; (+) strand; PAM type: YTN; PAM sequence: TTT
tacgggtaacagtgaggctg

SEQ ID NO: 27894 - DNA, 20 bp, Artificial Sequence
  Description of Artificial Sequence: Synthetic oligonucleotide
  Target: PCSK9; (+) strand; PAM type: YTN; PAM sequence: TTT
acgggtaacagtgaggctgg

SEQ ID NO: 27895 - DNA, 20 bp, Artificial Sequence
  Description of Artificial Sequence: Synthetic oligonucleotide
  Target: PCSK9; (+) strand; PAM type: YTN; PAM sequence: TTA
cgggtaacagtgaggctggg

SEQ ID NO: 27896 - DNA, 20 bp, Artificial Sequence
  Description of Artificial Sequence: Synthetic oligonucleotide
  Target: PCSK9; (+) strand; PAM type: YTN; PAM sequence: CTG
ggaaggggaacacagaccag

SEQ ID NO: 27897 - DNA, 20 bp, Artificial Sequence
  Description of Artificial Sequence: Synthetic oligonucleotide
  Target: PCSK9; (+) strand; PAM type: YTN; PAM sequence: CTC
ggtgagtgatggcagaacga

SEQ ID NO: 27898 - DNA, 20 bp, Artificial Sequence
  Description of Artificial Sequence: Synthetic oligonucleotide
  Target: PCSK9; (+) strand; PAM type: YTN; PAM sequence: CTG
caggcatggaactttttccg

SEQ ID NO: 27899 - DNA, 20 bp, Artificial Sequence
  Description of Artificial Sequence: Synthetic oligonucleotide
  Target: PCSK9; (+) strand; PAM type: YTN; PAM sequence: CTT
tttccgttatcacccaggcc

SEQ ID NO: 27900 - DNA, 20 bp, Artificial Sequence
  Description of Artificial Sequence: Synthetic oligonucleotide
  Target: PCSK9; (+) strand; PAM type: YTN; PAM sequence: TTT
ttccgttatcacccaggcct

SEQ ID NO: 27901 - DNA, 20 bp, Artificial Sequence
  Description of Artificial Sequence: Synthetic oligonucleotide
  Target: PCSK9; (+) strand; PAM type: YTN; PAM sequence: TTT
tccgttatcacccaggcctg

SEQ ID NO: 27902 - DNA, 20 bp, Artificial Sequence
  Description of Artificial Sequence: Synthetic oligonucleotide
  Target: PCSK9; (+) strand; PAM type: YTN; PAM sequence: TTT
ccgttatcacccaggcctga

SEQ ID NO: 27903 - DNA, 20 bp, Artificial Sequence
  Description of Artificial Sequence: Synthetic oligonucleotide
  Target: PCSK9; (+) strand; PAM type: YTN; PAM sequence: TTC
cgttatcacccaggcctgat

SEQ ID NO: 27904 - DNA, 20 bp, Artificial Sequence
  Description of Artificial Sequence: Synthetic oligonucleotide
  Target: PCSK9; (+) strand; PAM type: YTN; PAM sequence: TTA
tcacccaggcctgattcact

SEQ ID NO: 27905 - DNA, 20 bp, Artificial Sequence
  Description of Artificial Sequence: Synthetic oligonucleotide
  Target: PCSK9; (+) strand; PAM type: YTN; PAM sequence: CTG
attcactggcctggcggaga

SEQ ID NO: 27906 - DNA, 20 bp, Artificial Sequence
  Description of Artificial Sequence: Synthetic oligonucleotide
  Target: PCSK9; (+) strand; PAM type: YTN; PAM sequence: TTC
actggcctggcggagatgct

SEQ ID NO: 27907 - DNA, 20 bp, Artificial Sequence
  Description of Artificial Sequence: Synthetic oligonucleotide
  Target: PCSK9; (+) strand; PAM type: YTN; PAM sequence: CTG
gcctggcggagatgcttcta

SEQ ID NO: 27908 - DNA, 20 bp, Artificial Sequence
  Description of Artificial Sequence: Synthetic oligonucleotide
  Target: PCSK9; (+) strand; PAM type: YTN; PAM sequence: CTG
gcggagatgcttctaaggca

SEQ ID NO: 27909 - DNA, 20 bp, Artificial Sequence
  Description of Artificial Sequence: Synthetic oligonucleotide
  Target: PCSK9; (+) strand; PAM type: YTN; PAM sequence: CTT
ctaaggcatggtcgggggag

SEQ ID NO: 27910 - DNA, 20 bp, Artificial Sequence
  Description of Artificial Sequence: Synthetic oligonucleotide
  Target: PCSK9; (+) strand; PAM type: YTN; PAM sequence: TTC
taaggcatggtcgggggaga

SEQ ID NO: 27911 - DNA, 20 bp, Artificial Sequence
  Description of Artificial Sequence: Synthetic oligonucleotide
  Target: PCSK9; (+) strand; PAM type: YTN; PAM sequence: CTA
aggcatggtcgggggagagg

SEQ ID NO: 27912 - DNA, 20 bp, Artificial Sequence
  Description of Artificial Sequence: Synthetic oligonucleotide
  Target: PCSK9; (+) strand; PAM type: YTN; PAM sequence: CTG
tccctccttgagcaccagcc

SEQ ID NO: 27913 - DNA, 20 bp, Artificial Sequence
  Description of Artificial Sequence: Synthetic oligonucleotide
  Target: PCSK9; (+) strand; PAM type: YTN; PAM sequence: CTC
cttgagcaccagccccaccc

SEQ ID NO: 27914 - DNA, 20 bp, Artificial Sequence
  Description of Artificial Sequence: Synthetic oligonucleotide
  Target: PCSK9; (+) strand; PAM type: YTN; PAM sequence: CTT
gagcaccagccccacccaag

SEQ ID NO: 27915 - DNA, 20 bp, Artificial Sequence
  Description of Artificial Sequence: Synthetic oligonucleotide
  Target: PCSK9; (+) strand; PAM type: YTN; PAM sequence: TTG
agcaccagccccacccaagc

SEQ ID NO: 27916 - DNA, 20 bp, Artificial Sequence
  Description of Artificial Sequence: Synthetic oligonucleotide
  Target: PCSK9; (+) strand; PAM type: YTN; PAM sequence: TTT
atcttttgggtctgtcctct

SEQ ID NO: 27917 - DNA, 20 bp, Artificial Sequence
  Description of Artificial Sequence: Synthetic oligonucleotide
  Target: PCSK9; (+) strand; PAM type: YTN; PAM sequence: TTA
tcttttgggtctgtcctctc

SEQ ID NO: 27918 - DNA, 20 bp, Artificial Sequence
  Description of Artificial Sequence: Synthetic oligonucleotide
  Target: PCSK9; (+) strand; PAM type: YTN; PAM sequence: CTT
ttgggtctgtcctctctgtt

SEQ ID NO: 27919 - DNA, 20 bp, Artificial Sequence
  Description of Artificial Sequence: Synthetic oligonucleotide
  Target: PCSK9; (+) strand; PAM type: YTN; PAM sequence: TTT
tgggtctgtcctctctgttg

SEQ ID NO: 27920 - DNA, 20 bp, Artificial Sequence
  Description of Artificial Sequence: Synthetic oligonucleotide
  Target: PCSK9; (+) strand; PAM type: YTN; PAM sequence: TTT
gggtctgtcctctctgttgc

SEQ ID NO: 27921 - DNA, 20 bp, Artificial Sequence
  Description of Artificial Sequence: Synthetic oligonucleotide
  Target: PCSK9; (+) strand; PAM type: YTN; PAM sequence: TTG
ggtctgtcctctctgttgcc

SEQ ID NO: 27922 - DNA, 20 bp, Artificial Sequence
  Description of Artificial Sequence: Synthetic oligonucleotide
  Target: PCSK9; (+) strand; PAM type: YTN; PAM sequence: CTG
tcctctctgttgccttttta

SEQ ID NO: 27923 - DNA, 20 bp, Artificial Sequence
  Description of Artificial Sequence: Synthetic oligonucleotide
  Target: PCSK9; (+) strand; PAM type: YTN; PAM sequence: CTC
tctgttgcctttttacagcc

SEQ ID NO: 27924 - DNA, 20 bp, Artificial Sequence
  Description of Artificial Sequence: Synthetic oligonucleotide
  Target: PCSK9; (+) strand; PAM type: YTN; PAM sequence: CTC
tgttgcctttttacagccaa

SEQ ID NO: 27925 - DNA, 20 bp, Artificial Sequence
  Description of Artificial Sequence: Synthetic oligonucleotide
  Target: PCSK9; (+) strand; PAM type: YTN; PAM sequence: CTG
ttgcctttttacagccaact

SEQ ID NO: 27926 - DNA, 20 bp, Artificial Sequence
  Description of Artificial Sequence: Synthetic oligonucleotide
  Target: PCSK9; (+) strand; PAM type: YTN; PAM sequence: TTG
cctttttacagccaactttt

SEQ ID NO: 27927 - DNA, 20 bp, Artificial Sequence
  Description of Artificial Sequence: Synthetic oligonucleotide
  Target: PCSK9; (+) strand; PAM type: YTN; PAM sequence: CTT
tttacagccaacttttctag

SEQ ID NO: 27928 - DNA, 20 bp, Artificial Sequence
  Description of Artificial Sequence: Synthetic oligonucleotide
  Target: PCSK9; (+) strand; PAM type: YTN; PAM sequence: TTT
ttacagccaacttttctaga

SEQ ID NO: 27929 - DNA, 20 bp, Artificial Sequence
  Description of Artificial Sequence: Synthetic oligonucleotide
  Target: PCSK9; (+) strand; PAM type: YTN; PAM sequence: TTT
tacagccaacttttctagac

SEQ ID NO: 27930 - DNA, 20 bp, Artificial Sequence
  Description of Artificial Sequence: Synthetic oligonucleotide
  Target: PCSK9; (+) strand; PAM type: YTN; PAM sequence: TTT
acagccaacttttctagacc

SEQ ID NO: 27931 - DNA, 20 bp, Artificial Sequence
  Description of Artificial Sequence: Synthetic oligonucleotide
  Target: PCSK9; (+) strand; PAM type: YTN; PAM sequence: TTA
cagccaacttttctagacct

SEQ ID NO: 27932 - DNA, 20 bp, Artificial Sequence
  Description of Artificial Sequence: Synthetic oligonucleotide
  Target: PCSK9; (+) strand; PAM type: YTN; PAM sequence: CTT
ttctagacctgttttgcttt

SEQ ID NO: 27933 - DNA, 20 bp, Artificial Sequence
  Description of Artificial Sequence: Synthetic oligonucleotide
  Target: PCSK9; (+) strand; PAM type: YTN; PAM sequence: TTT
tctagacctgttttgctttt

SEQ ID NO: 27934 - DNA, 20 bp, Artificial Sequence
  Description of Artificial Sequence: Synthetic oligonucleotide
  Target: PCSK9; (+) strand; PAM type: YTN; PAM sequence: TTT
ctagacctgttttgcttttg

SEQ ID NO: 27935 - DNA, 20 bp, Artificial Sequence
  Description of Artificial Sequence: Synthetic oligonucleotide
  Target: PCSK9; (+) strand; PAM type: YTN; PAM sequence: TTC
tagacctgttttgcttttgt

SEQ ID NO: 27936 - DNA, 20 bp, Artificial Sequence
  Description of Artificial Sequence: Synthetic oligonucleotide
  Target: PCSK9; (+) strand; PAM type: YTN; PAM sequence: CTA
gacctgttttgcttttgtaa

SEQ ID NO: 27937 - DNA, 20 bp, Artificial Sequence
  Description of Artificial Sequence: Synthetic oligonucleotide
  Target: PCSK9; (+) strand; PAM type: YTN; PAM sequence: CTG
ttttgcttttgtaacttgaa

SEQ ID NO: 27938 - DNA, 20 bp, Artificial Sequence
  Description of Artificial Sequence: Synthetic oligonucleotide
  Target: PCSK9; (+) strand; PAM type: YTN; PAM sequence: TTT
tgcttttgtaacttgaagat

SEQ ID NO: 27939 - DNA, 20 bp, Artificial Sequence
  Description of Artificial Sequence: Synthetic oligonucleotide
  Target: PCSK9; (+) strand; PAM type: YTN; PAM sequence: TTT
gcttttgtaacttgaagata

SEQ ID NO: 27940 - DNA, 20 bp, Artificial Sequence
  Description of Artificial Sequence: Synthetic oligonucleotide
  Target: PCSK9; (+) strand; PAM type: YTN; PAM sequence: TTG
cttttgtaacttgaagatat

SEQ ID NO: 27941 - DNA, 20 bp, Artificial Sequence
  Description of Artificial Sequence: Synthetic oligonucleotide
  Target: PCSK9; (+) strand; PAM type: YTN; PAM sequence: CTT
ttgtaacttgaagatattta

SEQ ID NO: 27942 - DNA, 20 bp, Artificial Sequence
  Description of Artificial Sequence: Synthetic oligonucleotide
  Target: PCSK9; (+) strand; PAM type: YTN; PAM sequence: TTT
tgtaacttgaagatatttat

SEQ ID NO: 27943 - DNA, 20 bp, Artificial Sequence
  Description of Artificial Sequence: Synthetic oligonucleotide
  Target: PCSK9; (+) strand; PAM type: YTN; PAM sequence: TTT
gtaacttgaagatatttatt

SEQ ID NO: 27944 - DNA, 20 bp, Artificial Sequence
  Description of Artificial Sequence: Synthetic oligonucleotide
  Target: PCSK9; (+) strand; PAM type: YTN; PAM sequence: TTG
taacttgaagatatttattc

SEQ ID NO: 27945 - DNA, 20 bp, Artificial Sequence
  Description of Artificial Sequence: Synthetic oligonucleotide
  Target: PCSK9; (+) strand; PAM type: YTN; PAM sequence: CTT
gaagatatttattctgggtt

SEQ ID NO: 27946 - DNA, 20 bp, Artificial Sequence
  Description of Artificial Sequence: Synthetic oligonucleotide
  Target: PCSK9; (+) strand; PAM type: YTN; PAM sequence: TTG
aagatatttattctgggttt

SEQ ID NO: 27947 - DNA, 20 bp, Artificial Sequence
  Description of Artificial Sequence: Synthetic oligonucleotide
  Target: PCSK9; (+) strand; PAM type: YTN; PAM sequence: TTT
attctgggttttgtagcatt

SEQ ID NO: 27948 - DNA, 20 bp, Artificial Sequence
  Description of Artificial Sequence: Synthetic oligonucleotide
  Target: PCSK9; (+) strand; PAM type: YTN; PAM sequence: TTA
ttctgggttttgtagcattt

SEQ ID NO: 27949 - DNA, 20 bp, Artificial Sequence
  Description of Artificial Sequence: Synthetic oligonucleotide
  Target: PCSK9; (+) strand; PAM type: YTN; PAM sequence: TTC
tgggttttgtagcattttta

SEQ ID NO: 27950 - DNA, 20 bp, Artificial Sequence
  Description of Artificial Sequence: Synthetic oligonucleotide
  Target: PCSK9; (+) strand; PAM type: YTN; PAM sequence: CTG
ggttttgtagcatttttatt

SEQ ID NO: 27951 - DNA, 20 bp, Artificial Sequence
  Description of Artificial Sequence: Synthetic oligonucleotide
  Target: PCSK9; (+) strand; PAM type: YTN; PAM sequence: TTT
tgtagcatttttattaatat

SEQ ID NO: 27952 - DNA, 20 bp, Artificial Sequence
  Description of Artificial Sequence: Synthetic oligonucleotide
  Target: PCSK9; (+) strand; PAM type: YTN; PAM sequence: TTT
gtagcatttttattaatatg

SEQ ID NO: 27953 - DNA, 20 bp, Artificial Sequence
  Description of Artificial Sequence: Synthetic oligonucleotide
  Target: PCSK9; (+) strand; PAM type: YTN; PAM sequence: TTG
tagcatttttattaatatgg

SEQ ID NO: 27954 - DNA, 20 bp, Artificial Sequence
  Description of Artificial Sequence: Synthetic oligonucleotide
  Target: PCSK9; (+) strand; PAM type: YTN; PAM sequence: TTT
ttattaatatggtgactttt

SEQ ID NO: 27955 - DNA, 20 bp, Artificial Sequence
  Description of Artificial Sequence: Synthetic oligonucleotide
  Target: PCSK9; (+) strand; PAM type: YTN; PAM sequence: TTT
tattaatatggtgacttttt

SEQ ID NO: 27956 - DNA, 20 bp, Artificial Sequence
  Description of Artificial Sequence: Synthetic oligonucleotide
  Target: PCSK9; (+) strand; PAM type: YTN; PAM sequence: TTT
attaatatggtgacttttta

SEQ ID NO: 27957 - DNA, 20 bp, Artificial Sequence
  Description of Artificial Sequence: Synthetic oligonucleotide
  Target: PCSK9; (+) strand; PAM type: YTN; PAM sequence: TTA
ttaatatggtgactttttaa

SEQ ID NO: 27958 - DNA, 20 bp, Artificial Sequence
  Description of Artificial Sequence: Synthetic oligonucleotide
  Target: PCSK9; (+) strand; PAM type: YTN; PAM sequence: TTA
atatggtgactttttaaaat

SEQ ID NO: 27959 - DNA, 20 bp, Artificial Sequence
  Description of Artificial Sequence: Synthetic oligonucleotide
  Target: PCSK9; (+) strand; PAM type: YTN; PAM sequence: CTT
tttaaaataaaaacaaacaa

SEQ ID NO: 27960 - DNA, 20 bp, Artificial Sequence
  Description of Artificial Sequence: Synthetic oligonucleotide
  Target: PCSK9; (+) strand; PAM type: YTN; PAM sequence: TTT
ttaaaataaaaacaaacaaa

SEQ ID NO: 27961 - DNA, 20 bp, Artificial Sequence
  Description of Artificial Sequence: Synthetic oligonucleotide
  Target: PCSK9; (+) strand; PAM type: YTN; PAM sequence: TTT
taaaataaaaacaaacaaac

SEQ ID NO: 27962 - DNA, 20 bp, Artificial Sequence
  Description of Artificial Sequence: Synthetic oligonucleotide
  Target: PCSK9; (+) strand; PAM type: YTN; PAM sequence: TTT
aaaataaaaacaaacaaacg

SEQ ID NO: 27963 - DNA, 20 bp, Artificial Sequence
  Description of Artificial Sequence: Synthetic oligonucleotide
  Target: PCSK9; (+) strand; PAM type: YTN; PAM sequence: TTA
aaataaaaacaaacaaacgt

SEQ ID NO: 27964 - DNA, 20 bp, Artificial Sequence
  Description of Artificial Sequence: Synthetic oligonucleotide
  Target: PCSK9; (+) strand; PAM type: YTN; PAM sequence: TTG
tcctaactcttgcatagact

SEQ ID NO: 27965 - DNA, 20 bp, Artificial Sequence
  Description of Artificial Sequence: Synthetic oligonucleotide
  Target: PCSK9; (+) strand; PAM type: YTN; PAM sequence: CTA
actcttgcatagacttgact

SEQ ID NO: 27966 - DNA, 20 bp, Artificial Sequence
  Description of Artificial Sequence: Synthetic oligonucleotide
  Target: PCSK9; (+) strand; PAM type: YTN; PAM sequence: CTC
ttgcatagacttgactgcct

SEQ ID NO: 27967 - DNA, 20 bp, Artificial Sequence
  Description of Artificial Sequence: Synthetic oligonucleotide
  Target: PCSK9; (+) strand; PAM type: YTN; PAM sequence: CTT
gcatagacttgactgcctag

SEQ ID NO: 27968 - DNA, 20 bp, Artificial Sequence
  Description of Artificial Sequence: Synthetic oligonucleotide
  Target: PCSK9; (+) strand; PAM type: YTN; PAM sequence: TTG
catagacttgactgcctagg

SEQ ID NO: 27969 - DNA, 20 bp, Artificial Sequence
  Description of Artificial Sequence: Synthetic oligonucleotide
  Target: PCSK9; (+) strand; PAM type: YTN; PAM sequence: CTT
gactgcctagggtgatgcct

SEQ ID NO: 27970 - DNA, 20 bp, Artificial Sequence
  Description of Artificial Sequence: Synthetic oligonucleotide
  Target: PCSK9; (+) strand; PAM type: YTN; PAM sequence: TTG
actgcctagggtgatgcctt

SEQ ID NO: 27971 - DNA, 20 bp, Artificial Sequence
  Description of Artificial Sequence: Synthetic oligonucleotide
  Target: PCSK9; (+) strand; PAM type: YTN; PAM sequence: CTG
cctagggtgatgccttgctt

SEQ ID NO: 27972 - DNA, 20 bp, Artificial Sequence
  Description of Artificial Sequence: Synthetic oligonucleotide
  Target: PCSK9; (+) strand; PAM type: YTN; PAM sequence: CTA
gggtgatgccttgcttatac

SEQ ID NO: 27973 - DNA, 20 bp, Artificial Sequence
  Description of Artificial Sequence: Synthetic oligonucleotide
  Target: PCSK9; (+) strand; PAM type: YTN; PAM sequence: CTT
gcttatactaggaactgggt

SEQ ID NO: 27974 - DNA, 20 bp, Artificial Sequence
  Description of Artificial Sequence: Synthetic oligonucleotide
  Target: PCSK9; (+) strand; PAM type: YTN; PAM sequence: TTG
cttatactaggaactgggta

SEQ ID NO: 27975 - DNA, 20 bp, Artificial Sequence
  Description of Artificial Sequence: Synthetic oligonucleotide
  Target: PCSK9; (+) strand; PAM type: YTN; PAM sequence: CTT
atactaggaactgggtaagt

SEQ ID NO: 27976 - DNA, 20 bp, Artificial Sequence
  Description of Artificial Sequence: Synthetic oligonucleotide
  Target: PCSK9; (+) strand; PAM type: YTN; PAM sequence: TTA
tactaggaactgggtaagtt

SEQ ID NO: 27977 - DNA, 20 bp, Artificial Sequence
  Description of Artificial Sequence: Synthetic oligonucleotide
  Target: PCSK9; (+) strand; PAM type: YTN; PAM sequence: CTA
ggaactgggtaagtttgttg

SEQ ID NO: 27978 - DNA, 20 bp, Artificial Sequence
  Description of Artificial Sequence: Synthetic oligonucleotide
  Target: PCSK9; (+) strand; PAM type: YTN; PAM sequence: CTG
ggtaagtttgttgaatagtt

SEQ ID NO: 27979 - DNA, 20 bp, Artificial Sequence
  Description of Artificial Sequence: Synthetic oligonucleotide
  Target: PCSK9; (+) strand; PAM type: YTN; PAM sequence: TTT
gttgaatagttgagtaagcc

SEQ ID NO: 27980 - DNA, 20 bp, Artificial Sequence
  Description of Artificial Sequence: Synthetic oligonucleotide
  Target: PCSK9; (+) strand; PAM type: YTN; PAM sequence: TTG
ttgaatagttgagtaagcca

SEQ ID NO: 27981 - DNA, 20 bp, Artificial Sequence
  Description of Artificial Sequence: Synthetic oligonucleotide
  Target: PCSK9; (+) strand; PAM type: YTN; PAM sequence: TTG
aatagttgagtaagccaagt

SEQ ID NO: 27982 - DNA, 20 bp, Artificial Sequence
  Description of Artificial Sequence: Synthetic oligonucleotide
  Target: PCSK9; (+) strand; PAM type: YTN; PAM sequence: TTG
agtaagccaagtatttgatg

SEQ ID NO: 27983 - DNA, 20 bp, Artificial Sequence
  Description of Artificial Sequence: Synthetic oligonucleotide
  Target: PCSK9; (+) strand; PAM type: YTN; PAM sequence: TTT
gatgagtacttttatcttga

SEQ ID NO: 27984 - DNA, 20 bp, Artificial Sequence
  Description of Artificial Sequence: Synthetic oligonucleotide
  Target: PCSK9; (+) strand; PAM type: YTN; PAM sequence: TTG
atgagtacttttatcttgag

SEQ ID NO: 27985 - DNA, 20 bp, Artificial Sequence
  Description of Artificial Sequence: Synthetic oligonucleotide
  Target: PCSK9; (+) strand; PAM type: YTN; PAM sequence: CTT
ttatcttgagtacaagtatt

SEQ ID NO: 27986 - DNA, 20 bp, Artificial Sequence
  Description of Artificial Sequence: Synthetic oligonucleotide
  Target: PCSK9; (+) strand; PAM type: YTN; PAM sequence: TTT
tatcttgagtacaagtattg

SEQ ID NO: 27987 - DNA, 20 bp, Artificial Sequence
  Description of Artificial Sequence: Synthetic oligonucleotide
  Target: PCSK9; (+) strand; PAM type: YTN; PAM sequence: TTT
atcttgagtacaagtattgg

SEQ ID NO: 27988 - DNA, 20 bp, Artificial Sequence
  Description of Artificial Sequence: Synthetic oligonucleotide
  Target: PCSK9; (+) strand; PAM type: YTN; PAM sequence: TTA
tcttgagtacaagtattggg

SEQ ID NO: 27989 - DNA, 20 bp, Artificial Sequence
  Description of Artificial Sequence: Synthetic oligonucleotide
  Target: PCSK9; (+) strand; PAM type: YTN; PAM sequence: CTT
gagtacaagtattgggcaag

SEQ ID NO: 27990 - DNA, 20 bp, Artificial Sequence
  Description of Artificial Sequence: Synthetic oligonucleotide
  Target: PCSK9; (+) strand; PAM type: YTN; PAM sequence: TTG
agtacaagtattgggcaagt

SEQ ID NO: 27991 - DNA, 20 bp, Artificial Sequence
  Description of Artificial Sequence: Synthetic oligonucleotide
  Target: PCSK9; (+) strand; PAM type: YTN; PAM sequence: TTG
ggcaagtactggtgatgtga

SEQ ID NO: 27992 - DNA, 20 bp, Artificial Sequence
  Description of Artificial Sequence: Synthetic oligonucleotide
  Target: PCSK9; (+) strand; PAM type: YTN; PAM sequence: CTG
gtgatgtgaacttactcctt

SEQ ID NO: 27993 - DNA, 20 bp, Artificial Sequence
  Description of Artificial Sequence: Synthetic oligonucleotide
  Target: PCSK9; (+) strand; PAM type: YTN; PAM sequence: CTT
actccttgtgcctatcctag

SEQ ID NO: 27994 - DNA, 20 bp, Artificial Sequence
  Description of Artificial Sequence: Synthetic oligonucleotide
  Target: PCSK9; (+) strand; PAM type: YTN; PAM sequence: TTA
ctccttgtgcctatcctagg

SEQ ID NO: 27995 - DNA, 20 bp, Artificial Sequence
  Description of Artificial Sequence: Synthetic oligonucleotide
  Target: PCSK9; (+) strand; PAM type: YTN; PAM sequence: CTC
cttgtgcctatcctaggaat

SEQ ID NO: 27996 - DNA, 20 bp, Artificial Sequence
  Description of Artificial Sequence: Synthetic oligonucleotide
  Target: PCSK9; (+) strand; PAM type: YTN; PAM sequence: CTT
gtgcctatcctaggaatgaa

SEQ ID NO: 27997 - DNA, 20 bp, Artificial Sequence
  Description of Artificial Sequence: Synthetic oligonucleotide
  Target: PCSK9; (+) strand; PAM type: YTN; PAM sequence: TTG
tgcctatcctaggaatgaaa

SEQ ID NO: 27998 - DNA, 20 bp, Artificial Sequence
  Description of Artificial Sequence: Synthetic oligonucleotide
  Target: PCSK9; (+) strand; PAM type: YTN; PAM sequence: CTA
tcctaggaatgaaatgaatg

SEQ ID NO: 27999 - DNA, 20 bp, Artificial Sequence
  Description of Artificial Sequence: Synthetic oligonucleotide
  Target: PCSK9; (+) strand; PAM type: YTN; PAM sequence: CTA
ggaatgaaatgaatgtcttc

SEQ ID NO: 28000 - DNA, 20 bp, Artificial Sequence
  Description of Artificial Sequence: Synthetic oligonucleotide
  Target: PCSK9; (+) strand; PAM type: YTN; PAM sequence: CTT
cctgcagctcccctgaccac

SEQ ID NO: 28001 - DNA, 20 bp, Artificial Sequence
  Description of Artificial Sequence: Synthetic oligonucleotide
  Target: PCSK9; (+) strand; PAM type: YTN; PAM sequence: TTC
ctgcagctcccctgaccacc

SEQ ID NO: 28002 - DNA, 20 bp, Artificial Sequence
  Description of Artificial Sequence: Synthetic oligonucleotide
  Target: PCSK9; (+) strand; PAM type: YTN; PAM sequence: CTG
cagctcccctgaccaccctg

SEQ ID NO: 28003 - DNA, 20 bp, Artificial Sequence
  Description of Artificial Sequence: Synthetic oligonucleotide
  Target: PCSK9; (+) strand; PAM type: YTN; PAM sequence: CTC
ccctgaccaccctgacagtc

SEQ ID NO: 28004 - DNA, 20 bp, Artificial Sequence
  Description of Artificial Sequence: Synthetic oligonucleotide
  Target: PCSK9; (+) strand; PAM type: YTN; PAM sequence: CTG
accaccctgacagtcaaagt

SEQ ID NO: 28005 - DNA, 20 bp, Artificial Sequence
  Description of Artificial Sequence: Synthetic oligonucleotide
  Target: PCSK9; (+) strand; PAM type: YTN; PAM sequence: CTG
acagtcaaagtgcctcctcc

SEQ ID NO: 28006 - DNA, 20 bp, Artificial Sequence
  Description of Artificial Sequence: Synthetic oligonucleotide
  Target: PCSK9; (+) strand; PAM type: YTN; PAM sequence: CTC
ctccttggtgacaggtgccc

SEQ ID NO: 28007 - DNA, 20 bp, Artificial Sequence
  Description of Artificial Sequence: Synthetic oligonucleotide
  Target: PCSK9; (+) strand; PAM type: YTN; PAM sequence: CTC
cttggtgacaggtgccctac

SEQ ID NO: 28008 - DNA, 20 bp, Artificial Sequence
  Description of Artificial Sequence: Synthetic oligonucleotide
  Target: PCSK9; (+) strand; PAM type: YTN; PAM sequence: CTT
ggtgacaggtgccctacagc

SEQ ID NO: 28009 - DNA, 20 bp, Artificial Sequence
  Description of Artificial Sequence: Synthetic oligonucleotide
  Target: PCSK9; (+) strand; PAM type: YTN; PAM sequence: TTG
gtgacaggtgccctacagca

SEQ ID NO: 28010 - DNA, 20 bp, Artificial Sequence
  Description of Artificial Sequence: Synthetic oligonucleotide
  Target: PCSK9; (+) strand; PAM type: YTN; PAM sequence: CTA
cagcactctagatgctctgt

SEQ ID NO: 28011 - DNA, 20 bp, Artificial Sequence
  Description of Artificial Sequence: Synthetic oligonucleotide
  Target: PCSK9; (+) strand; PAM type: YTN; PAM sequence: CTC
tagatgctctgttgtcctga

SEQ ID NO: 28012 - DNA, 20 bp, Artificial Sequence
  Description of Artificial Sequence: Synthetic oligonucleotide
  Target: PCSK9; (+) strand; PAM type: YTN; PAM sequence: CTA
gatgctctgttgtcctgacc

SEQ ID NO: 28013 - DNA, 20 bp, Artificial Sequence
  Description of Artificial Sequence: Synthetic oligonucleotide
  Target: PCSK9; (+) strand; PAM type: YTN; PAM sequence: CTC
tgttgtcctgacctcccaat

SEQ ID NO: 28014 - DNA, 20 bp, Artificial Sequence
  Description of Artificial Sequence: Synthetic oligonucleotide
  Target: PCSK9; (+) strand; PAM type: YTN; PAM sequence: CTG
ttgtcctgacctcccaatgc

SEQ ID NO: 28015 - DNA, 20 bp, Artificial Sequence
  Description of Artificial Sequence: Synthetic oligonucleotide
  Target: PCSK9; (+) strand; PAM type: YTN; PAM sequence: TTG
tcctgacctcccaatgccct

SEQ ID NO: 28016 - DNA, 20 bp, Artificial Sequence
  Description of Artificial Sequence: Synthetic oligonucleotide
  Target: PCSK9; (+) strand; PAM type: YTN; PAM sequence: CTG
acctcccaatgcccttttca

SEQ ID NO: 28017 - DNA, 20 bp, Artificial Sequence
  Description of Artificial Sequence: Synthetic oligonucleotide
  Target: PCSK9; (+) strand; PAM type: YTN; PAM sequence: CTC
ccaatgcccttttcattctt

SEQ ID NO: 28018 - DNA, 20 bp, Artificial Sequence
  Description of Artificial Sequence: Synthetic oligonucleotide
  Target: PCSK9; (+) strand; PAM type: YTN; PAM sequence: CTT
ttcattcttttctccccagt

SEQ ID NO: 28019 - DNA, 20 bp, Artificial Sequence
  Description of Artificial Sequence: Synthetic oligonucleotide
  Target: PCSK9; (+) strand; PAM type: YTN; PAM sequence: TTT
tcattcttttctccccagta

SEQ ID NO: 28020 - DNA, 20 bp, Artificial Sequence
  Description of Artificial Sequence: Synthetic oligonucleotide
  Target: PCSK9; (+) strand; PAM type: YTN; PAM sequence: TTT
cattcttttctccccagtac

SEQ ID NO: 28021 - DNA, 20 bp, Artificial Sequence
  Description of Artificial Sequence: Synthetic oligonucleotide
  Target: PCSK9; (+) strand; PAM type: YTN; PAM sequence: TTC
attcttttctccccagtacc

SEQ ID NO: 28022 - DNA, 20 bp, Artificial Sequence
  Description of Artificial Sequence: Synthetic oligonucleotide
  Target: PCSK9; (+) strand; PAM type: YTN; PAM sequence: TTC
ttttctccccagtacctggc

SEQ ID NO: 28023 - DNA, 20 bp, Artificial Sequence
  Description of Artificial Sequence: Synthetic oligonucleotide
  Target: PCSK9; (+) strand; PAM type: YTN; PAM sequence: CTT
ttctccccagtacctggcac

SEQ ID NO: 28024 - DNA, 20 bp, Artificial Sequence
  Description of Artificial Sequence: Synthetic oligonucleotide
  Target: PCSK9; (+) strand; PAM type: YTN; PAM sequence: TTT
tctccccagtacctggcaca

SEQ ID NO: 28025 - DNA, 20 bp, Artificial Sequence
  Description of Artificial Sequence: Synthetic oligonucleotide
  Target: PCSK9; (+) strand; PAM type: YTN; PAM sequence: TTT
ctccccagtacctggcacac

SEQ ID NO: 28026 - DNA, 20 bp, Artificial Sequence
  Description of Artificial Sequence: Synthetic oligonucleotide
  Target: PCSK9; (+) strand; PAM type: YTN; PAM sequence: TTC
tccccagtacctggcacaca

SEQ ID NO: 28027 - DNA, 20 bp, Artificial Sequence
  Description of Artificial Sequence: Synthetic oligonucleotide
  Target: PCSK9; (+) strand; PAM type: YTN; PAM sequence: CTC
cccagtacctggcacacagc

SEQ ID NO: 28028 - DNA, 20 bp, Artificial Sequence
  Description of Artificial Sequence: Synthetic oligonucleotide
  Target: PCSK9; (+) strand; PAM type: YTN; PAM sequence: CTG
gcacacagcctggcccgagt

SEQ ID NO: 28029 - DNA, 20 bp, Artificial Sequence
  Description of Artificial Sequence: Synthetic oligonucleotide
  Target: PCSK9; (+) strand; PAM type: YTN; PAM sequence: CTG
gcccgagtatttacggaata

SEQ ID NO: 28030 - DNA, 20 bp, Artificial Sequence
  Description of Artificial Sequence: Synthetic oligonucleotide
  Target: PCSK9; (+) strand; PAM type: YTN; PAM sequence: TTT
acggaataagttacagtgcc

SEQ ID NO: 28031 - DNA, 20 bp, Artificial Sequence
  Description of Artificial Sequence: Synthetic oligonucleotide
  Target: PCSK9; (+) strand; PAM type: YTN; PAM sequence: TTA
cggaataagttacagtgcca

SEQ ID NO: 28032 - DNA, 20 bp, Artificial Sequence
  Description of Artificial Sequence: Synthetic oligonucleotide
  Target: PCSK9; (+) strand; PAM type: YTN; PAM sequence: TTA
cagtgccagatgcttctgta

SEQ ID NO: 28033 - DNA, 20 bp, Artificial Sequence
  Description of Artificial Sequence: Synthetic oligonucleotide
  Target: PCSK9; (+) strand; PAM type: YTN; PAM sequence: CTT
ctgtaatgagccagtgctaa

SEQ ID NO: 28034 - DNA, 20 bp, Artificial Sequence
  Description of Artificial Sequence: Synthetic oligonucleotide
  Target: PCSK9; (+) strand; PAM type: YTN; PAM sequence: TTC
tgtaatgagccagtgctaag

SEQ ID NO: 28035 - DNA, 20 bp, Artificial Sequence
  Description of Artificial Sequence: Synthetic oligonucleotide
  Target: PCSK9; (+) strand; PAM type: YTN; PAM sequence: CTG
taatgagccagtgctaagtc

SEQ ID NO: 28036 - DNA, 20 bp, Artificial Sequence
  Description of Artificial Sequence: Synthetic oligonucleotide
  Target: PCSK9; (+) strand; PAM type: YTN; PAM sequence: CTA
agtccatggcttttttcatg

SEQ ID NO: 28037 - DNA, 20 bp, Artificial Sequence
  Description of Artificial Sequence: Synthetic oligonucleotide
  Target: PCSK9; (+) strand; PAM type: YTN; PAM sequence: CTT
ttttcatgatttaaaattca

SEQ ID NO: 28038 - DNA, 20 bp, Artificial Sequence
  Description of Artificial Sequence: Synthetic oligonucleotide
  Target: PCSK9; (+) strand; PAM type: YTN; PAM sequence: TTT
tttcatgatttaaaattcag

SEQ ID NO: 28039 - DNA, 20 bp, Artificial Sequence
  Description of Artificial Sequence: Synthetic oligonucleotide
  Target: PCSK9; (+) strand; PAM type: YTN; PAM sequence: TTT
ttcatgatttaaaattcaga

SEQ ID NO: 28040 - DNA, 20 bp, Artificial Sequence
  Description of Artificial Sequence: Synthetic oligonucleotide
  Target: PCSK9; (+) strand; PAM type: YTN; PAM sequence: TTT
tcatgatttaaaattcagaa

SEQ ID NO: 28041 - DNA, 20 bp, Artificial Sequence
  Description of Artificial Sequence: Synthetic oligonucleotide
  Target: PCSK9; (+) strand; PAM type: YTN; PAM sequence: TTT
catgatttaaaattcagaac

SEQ ID NO: 28042 - DNA, 20 bp, Artificial Sequence
  Description of Artificial Sequence: Synthetic oligonucleotide
  Target: PCSK9; (+) strand; PAM type: YTN; PAM sequence: TTC
atgatttaaaattcagaaca

SEQ ID NO: 28043 - DNA, 20 bp, Artificial Sequence
  Description of Artificial Sequence: Synthetic oligonucleotide
  Target: PCSK9; (+) strand; PAM type: YTN; PAM sequence: TTT
aaaattcagaacagtctcag

SEQ ID NO: 28044 - DNA, 20 bp, Artificial Sequence
  Description of Artificial Sequence: Synthetic oligonucleotide
  Target: PCSK9; (+) strand; PAM type: YTN; PAM sequence: TTA
aaattcagaacagtctcaga

SEQ ID NO: 28045 - DNA, 20 bp, Artificial Sequence
  Description of Artificial Sequence: Synthetic oligonucleotide
  Target: PCSK9; (+) strand; PAM type: YTN; PAM sequence: TTC
agaacagtctcagattgggt

SEQ ID NO: 28046 - DNA, 20 bp, Artificial Sequence
  Description of Artificial Sequence: Synthetic oligonucleotide
  Target: PCSK9; (+) strand; PAM type: YTN; PAM sequence: CTC
agattgggtgcaatggctca

SEQ ID NO: 28047 - DNA, 20 bp, Artificial Sequence
  Description of Artificial Sequence: Synthetic oligonucleotide
  Target: PCSK9; (+) strand; PAM type: YTN; PAM sequence: TTG
ggtgcaatggctcacacctg

SEQ ID NO: 28048 - DNA, 20 bp, Artificial Sequence
  Description of Artificial Sequence: Synthetic oligonucleotide
  Target: PCSK9; (+) strand; PAM type: YTN; PAM sequence: CTC
acacctgtaatctcagtact

SEQ ID NO: 28049 - DNA, 20 bp, Artificial Sequence
  Description of Artificial Sequence: Synthetic oligonucleotide
  Target: PCSK9; (+) strand; PAM type: YTN; PAM sequence: CTG
taatctcagtactttgggag

SEQ ID NO: 28050 - DNA, 20 bp, Artificial Sequence
  Description of Artificial Sequence: Synthetic oligonucleotide
  Target: PCSK9; (+) strand; PAM type: YTN; PAM sequence: CTC
agtactttgggaggctgagg

SEQ ID NO: 28051 - DNA, 20 bp, Artificial Sequence
  Description of Artificial Sequence: Synthetic oligonucleotide
  Target: PCSK9; (+) strand; PAM type: YTN; PAM sequence: CTT
tgggaggctgaggcaggagg

SEQ ID NO: 28052 - DNA, 20 bp, Artificial Sequence
  Description of Artificial Sequence: Synthetic oligonucleotide
  Target: PCSK9; (+) strand; PAM type: YTN; PAM sequence: TTT
gggaggctgaggcaggagga

SEQ ID NO: 28053 - DNA, 20 bp, Artificial Sequence
  Description of Artificial Sequence: Synthetic oligonucleotide
  Target: PCSK9; (+) strand; PAM type: YTN; PAM sequence: TTG
ggaggctgaggcaggaggat

SEQ ID NO: 28054 - DNA, 20 bp, Artificial Sequence
  Description of Artificial Sequence: Synthetic oligonucleotide
  Target: PCSK9; (+) strand; PAM type: YTN; PAM sequence: CTG
aggcaggaggattgcttgtg

SEQ ID NO: 28055 - DNA, 20 bp, Artificial Sequence
  Description of Artificial Sequence: Synthetic oligonucleotide
  Target: PCSK9; (+) strand; PAM type: YTN; PAM sequence: TTG
cttgtgtttaggaattcaag

SEQ ID NO: 28056 - DNA, 20 bp, Artificial Sequence
  Description of Artificial Sequence: Synthetic oligonucleotide
  Target: PCSK9; (+) strand; PAM type: YTN; PAM sequence: CTT
gtgtttaggaattcaagacc

SEQ ID NO: 28057 - DNA, 20 bp, Artificial Sequence
  Description of Artificial Sequence: Synthetic oligonucleotide
  Target: PCSK9; (+) strand; PAM type: YTN; PAM sequence: TTG
tgtttaggaattcaagaccc

SEQ ID NO: 28058 - DNA, 20 bp, Artificial Sequence
  Description of Artificial Sequence: Synthetic oligonucleotide
  Target: PCSK9; (+) strand; PAM type: YTN; PAM sequence: TTT
aggaattcaagaccctgggc

SEQ ID NO: 28059 - DNA, 20 bp, Artificial Sequence
  Description of Artificial Sequence: Synthetic oligonucleotide
  Target: PCSK9; (+) strand; PAM type: YTN; PAM sequence: TTA
ggaattcaagaccctgggca

SEQ ID NO: 28060 - DNA, 20 bp, Artificial Sequence
  Description of Artificial Sequence: Synthetic oligonucleotide
  Target: PCSK9; (+) strand; PAM type: YTN; PAM sequence: TTC
aagaccctgggcaacagtga

SEQ ID NO: 28061 - DNA, 20 bp, Artificial Sequence
  Description of Artificial Sequence: Synthetic oligonucleotide
  Target: PCSK9; (+) strand; PAM type: YTN; PAM sequence: CTG
ggcaacagtgagaccccgtc

SEQ ID NO: 28062 - DNA, 20 bp, Artificial Sequence
  Description of Artificial Sequence: Synthetic oligonucleotide
  Target: PCSK9; (+) strand; PAM type: YTN; PAM sequence: CTC
tataaaaaaatttaaaagat

SEQ ID NO: 28063 - DNA, 20 bp, Artificial Sequence
  Description of Artificial Sequence: Synthetic oligonucleotide
  Target: PCSK9; (+) strand; PAM type: YTN; PAM sequence: CTA
taaaaaaatttaaaagatta

SEQ ID NO: 28064 - DNA, 20 bp, Artificial Sequence
  Description of Artificial Sequence: Synthetic oligonucleotide
  Target: PCSK9; (+) strand; PAM type: YTN; PAM sequence: TTT
aaaagattagcgaggtgtgg

SEQ ID NO: 28065 - DNA, 20 bp, Artificial Sequence
  Description of Artificial Sequence: Synthetic oligonucleotide
  Target: PCSK9; (+) strand; PAM type: YTN; PAM sequence: TTA
aaagattagcgaggtgtggt

SEQ ID NO: 28066 - DNA, 20 bp, Artificial Sequence
  Description of Artificial Sequence: Synthetic oligonucleotide
  Target: PCSK9; (+) strand; PAM type: YTN; PAM sequence: TTA
gcgaggtgtggtagcacatg

SEQ ID NO: 28067 - DNA, 20 bp, Artificial Sequence
  Description of Artificial Sequence: Synthetic oligonucleotide
  Target: PCSK9; (+) strand; PAM type: YTN; PAM sequence: CTG
tggtcccggctactcaggag

SEQ ID NO: 28068 - DNA, 20 bp, Artificial Sequence
  Description of Artificial Sequence: Synthetic oligonucleotide
  Target: PCSK9; (+) strand; PAM type: YTN; PAM sequence: CTA
ctcaggaggctgatatggga

SEQ ID NO: 28069 - DNA, 20 bp, Artificial Sequence
  Description of Artificial Sequence: Synthetic oligonucleotide
  Target: PCSK9; (+) strand; PAM type: YTN; PAM sequence: CTC
aggaggctgatatgggaggc

SEQ ID NO: 28070 - DNA, 20 bp, Artificial Sequence
  Description of Artificial Sequence: Synthetic oligonucleotide
  Target: PCSK9; (+) strand; PAM type: YTN; PAM sequence: CTG
atatgggaggcttgcttgag

SEQ ID NO: 28071 - DNA, 20 bp, Artificial Sequence
  Description of Artificial Sequence: Synthetic oligonucleotide
  Target: PCSK9; (+) strand; PAM type: YTN; PAM sequence: CTT
gcttgagctgggaggctgag

SEQ ID NO: 28072 - DNA, 20 bp, Artificial Sequence
  Description of Artificial Sequence: Synthetic oligonucleotide
  Target: PCSK9; (+) strand; PAM type: YTN; PAM sequence: TTG
cttgagctgggaggctgagg

SEQ ID NO: 28073 - DNA, 20 bp, Artificial Sequence
  Description of Artificial Sequence: Synthetic oligonucleotide
  Target: PCSK9; (+) strand; PAM type: YTN; PAM sequence: CTT
gagctgggaggctgagggtg

SEQ ID NO: 28074 - DNA, 20 bp, Artificial Sequence
  Description of Artificial Sequence: Synthetic oligonucleotide
  Target: PCSK9; (+) strand; PAM type: YTN; PAM sequence: TTG
agctgggaggctgagggtgc

SEQ ID NO: 28075 - DNA, 20 bp, Artificial Sequence
  Description of Artificial Sequence: Synthetic oligonucleotide
  Target: PCSK9; (+) strand; PAM type: YTN; PAM sequence: CTG
ggaggctgagggtgcagtga

SEQ ID NO: 28076 - DNA, 20 bp, Artificial Sequence
  Description of Artificial Sequence: Synthetic oligonucleotide
  Target: PCSK9; (+) strand; PAM type: YTN; PAM sequence: CTG
agggtgcagtgagctgtaat

SEQ ID NO: 28077 - DNA, 20 bp, Artificial Sequence
  Description of Artificial Sequence: Synthetic oligonucleotide
  Target: PCSK9; (+) strand; PAM type: YTN; PAM sequence: CTG
taattacatcatcactgcac

SEQ ID NO: 28078 - DNA, 20 bp, Artificial Sequence
  Description of Artificial Sequence: Synthetic oligonucleotide
  Target: PCSK9; (+) strand; PAM type: YTN; PAM sequence: TTA
catcatcactgcactgcagc

SEQ ID NO: 28079 - DNA, 20 bp, Artificial Sequence
  Description of Artificial Sequence: Synthetic oligonucleotide
  Target: PCSK9; (+) strand; PAM type: YTN; PAM sequence: CTG
cactgcagcctgggttacag

SEQ ID NO: 28080 - DNA, 20 bp, Artificial Sequence
  Description of Artificial Sequence: Synthetic oligonucleotide
  Target: PCSK9; (+) strand; PAM type: YTN; PAM sequence: CTG
cagcctgggttacagagtgc

SEQ ID NO: 28081 - DNA, 20 bp, Artificial Sequence
  Description of Artificial Sequence: Synthetic oligonucleotide
  Target: PCSK9; (+) strand; PAM type: YTN; PAM sequence: CTG
ggttacagagtgcataatga

SEQ ID NO: 28082 - DNA, 20 bp, Artificial Sequence
  Description of Artificial Sequence: Synthetic oligonucleotide
  Target: PCSK9; (+) strand; PAM type: YTN; PAM sequence: TTA
cagagtgcataatgatccca

SEQ ID NO: 28083 - DNA, 20 bp, Artificial Sequence
  Description of Artificial Sequence: Synthetic oligonucleotide
  Target: PCSK9; (+) strand; PAM type: YTN; PAM sequence: TTC
aatgtgggacctccaggccc

SEQ ID NO: 28084 - DNA, 20 bp, Artificial Sequence
  Description of Artificial Sequence: Synthetic oligonucleotide
  Target: PCSK9; (+) strand; PAM type: YTN; PAM sequence: CTC
caggccctccactctaaggc

SEQ ID NO: 28085 - DNA, 20 bp, Artificial Sequence
  Description of Artificial Sequence: Synthetic oligonucleotide
  Target: PCSK9; (+) strand; PAM type: YTN; PAM sequence: CTC
cactctaaggctggtgaata

SEQ ID NO: 28086 - DNA, 20 bp, Artificial Sequence
  Description of Artificial Sequence: Synthetic oligonucleotide
  Target: PCSK9; (+) strand; PAM type: YTN; PAM sequence: CTC
taaggctggtgaatatagct

SEQ ID NO: 28087 - DNA, 20 bp, Artificial Sequence
  Description of Artificial Sequence: Synthetic oligonucleotide
  Target: PCSK9; (+) strand; PAM type: YTN; PAM sequence: CTA
aggctggtgaatatagctgt

SEQ ID NO: 28088 - DNA, 20 bp, Artificial Sequence
  Description of Artificial Sequence: Synthetic oligonucleotide
  Target: PCSK9; (+) strand; PAM type: YTN; PAM sequence: CTG
gtgaatatagctgtcttaag

SEQ ID NO: 28089 - DNA, 20 bp, Artificial Sequence
  Description of Artificial Sequence: Synthetic oligonucleotide
  Target: PCSK9; (+) strand; PAM type: YTN; PAM sequence: CTG
tcttaagcaagttctctctc

SEQ ID NO: 28090 - DNA, 20 bp, Artificial Sequence
  Description of Artificial Sequence: Synthetic oligonucleotide
  Target: PCSK9; (+) strand; PAM type: YTN; PAM sequence: CTT
aagcaagttctctctctctc

SEQ ID NO: 28091 - DNA, 20 bp, Artificial Sequence
  Description of Artificial Sequence: Synthetic oligonucleotide
  Target: PCSK9; (+) strand; PAM type: YTN; PAM sequence: TTA
agcaagttctctctctctct

SEQ ID NO: 28092 - DNA, 20 bp, Artificial Sequence
  Description of Artificial Sequence: Synthetic oligonucleotide
  Target: PCSK9; (+) strand; PAM type: YTN; PAM sequence: TTC
tctctctctctagacagccc

SEQ ID NO: 28093 - DNA, 20 bp, Artificial Sequence
  Description of Artificial Sequence: Synthetic oligonucleotide
  Target: PCSK9; (+) strand; PAM type: YTN; PAM sequence: CTC
tctctctctagacagcccat

SEQ ID NO: 28094 - DNA, 20 bp, Artificial Sequence
  Description of Artificial Sequence: Synthetic oligonucleotide
  Target: PCSK9; (+) strand; PAM type: YTN; PAM sequence: CTC
tctctctagacagcccatgt

SEQ ID NO: 28095 - DNA, 20 bp, Artificial Sequence
  Description of Artificial Sequence: Synthetic oligonucleotide
  Target: PCSK9; (+) strand; PAM type: YTN; PAM sequence: CTC
tctctagacagcccatgtca

SEQ ID NO: 28096 - DNA, 20 bp, Artificial Sequence
  Description of Artificial Sequence: Synthetic oligonucleotide
  Target: PCSK9; (+) strand; PAM type: YTN; PAM sequence: CTC
tctagacagcccatgtcata

SEQ ID NO: 28097 - DNA, 20 bp, Artificial Sequence
  Description of Artificial Sequence: Synthetic oligonucleotide
  Target: PCSK9; (+) strand; PAM type: YTN; PAM sequence: CTC
tagacagcccatgtcataag

SEQ ID NO: 28098 - DNA, 20 bp, Artificial Sequence
  Description of Artificial Sequence: Synthetic oligonucleotide
  Target: PCSK9; (+) strand; PAM type: YTN; PAM sequence: CTA
gacagcccatgtcataagga

SEQ ID NO: 28099 - DNA, 20 bp, Artificial Sequence
  Description of Artificial Sequence: Synthetic oligonucleotide
  Target: PCSK9; (+) strand; PAM type: YTN; PAM sequence: CTC
aggcaaaattcctcccagat

SEQ ID NO: 28100 - DNA, 20 bp, Artificial Sequence
  Description of Artificial Sequence: Synthetic oligonucleotide
  Target: PCSK9; (+) strand; PAM type: YTN; PAM sequence: TTC
ctcccagattacattttctg

SEQ ID NO: 28101 - DNA, 20 bp, Artificial Sequence
  Description of Artificial Sequence: Synthetic oligonucleotide
  Target: PCSK9; (+) strand; PAM type: YTN; PAM sequence: CTC
ccagattacattttctgaca

SEQ ID NO: 28102 - DNA, 20 bp, Artificial Sequence
  Description of Artificial Sequence: Synthetic oligonucleotide
  Target: PCSK9; (+) strand; PAM type: YTN; PAM sequence: TTA
cattttctgacaattcagtg

SEQ ID NO: 28103 - DNA, 20 bp, Artificial Sequence
  Description of Artificial Sequence: Synthetic oligonucleotide
  Target: PCSK9; (+) strand; PAM type: YTN; PAM sequence: TTT
tctgacaattcagtgtcata

SEQ ID NO: 28104 - DNA, 20 bp, Artificial Sequence
  Description of Artificial Sequence: Synthetic oligonucleotide
  Target: PCSK9; (+) strand; PAM type: YTN; PAM sequence: TTT
ctgacaattcagtgtcatat

SEQ ID NO: 28105 - DNA, 20 bp, Artificial Sequence
  Description of Artificial Sequence: Synthetic oligonucleotide
  Target: PCSK9; (+) strand; PAM type: YTN; PAM sequence: TTC
tgacaattcagtgtcatata

SEQ ID NO: 28106 - DNA, 20 bp, Artificial Sequence
  Description of Artificial Sequence: Synthetic oligonucleotide
  Target: PCSK9; (+) strand; PAM type: YTN; PAM sequence: CTG
acaattcagtgtcatatatg

SEQ ID NO: 28107 - DNA, 20 bp, Artificial Sequence
  Description of Artificial Sequence: Synthetic oligonucleotide
  Target: PCSK9; (+) strand; PAM type: YTN; PAM sequence: TTC
agtgtcatatatggaaagca

SEQ ID NO: 28108 - DNA, 20 bp, Artificial Sequence
  Description of Artificial Sequence: Synthetic oligonucleotide
  Target: PCSK9; (+) strand; PAM type: YTN; PAM sequence: TTC
aagagttgacagatggcaat

SEQ ID NO: 28109 - DNA, 20 bp, Artificial Sequence
  Description of Artificial Sequence: Synthetic oligonucleotide
  Target: PCSK9; (+) strand; PAM type: YTN; PAM sequence: TTG
acagatggcaatggcttgaa

SEQ ID NO: 28110 - DNA, 20 bp, Artificial Sequence
  Description of Artificial Sequence: Synthetic oligonucleotide
  Target: PCSK9; (+) strand; PAM type: YTN; PAM sequence: CTT
gaacacccaactgtgttatc

SEQ ID NO: 28111 - DNA, 20 bp, Artificial Sequence
  Description of Artificial Sequence: Synthetic oligonucleotide
  Target: PCSK9; (+) strand; PAM type: YTN; PAM sequence: TTG
aacacccaactgtgttatct

SEQ ID NO: 28112 - DNA, 20 bp, Artificial Sequence
  Description of Artificial Sequence: Synthetic oligonucleotide
  Target: PCSK9; (+) strand; PAM type: YTN; PAM sequence: CTG
tgttatctctgcccgttgga

SEQ ID NO: 28113 - DNA, 20 bp, Artificial Sequence
  Description of Artificial Sequence: Synthetic oligonucleotide
  Target: PCSK9; (+) strand; PAM type: YTN; PAM sequence: TTA
tctctgcccgttggaaccta

SEQ ID NO: 28114 - DNA, 20 bp, Artificial Sequence
  Description of Artificial Sequence: Synthetic oligonucleotide
  Target: PCSK9; (+) strand; PAM type: YTN; PAM sequence: CTC
tgcccgttggaacctaggcc

SEQ ID NO: 28115 - DNA, 20 bp, Artificial Sequence
  Description of Artificial Sequence: Synthetic oligonucleotide
  Target: PCSK9; (+) strand; PAM type: YTN; PAM sequence: CTG
cccgttggaacctaggcctg

SEQ ID NO: 28116 - DNA, 20 bp, Artificial Sequence
  Description of Artificial Sequence: Synthetic oligonucleotide
  Target: PCSK9; (+) strand; PAM type: YTN; PAM sequence: TTG
gaacctaggcctgtggtgca

SEQ ID NO: 28117 - DNA, 20 bp, Artificial Sequence
  Description of Artificial Sequence: Synthetic oligonucleotide
  Target: PCSK9; (+) strand; PAM type: YTN; PAM sequence: CTA
ggcctgtggtgcaaccctag

SEQ ID NO: 28118 - DNA, 20 bp, Artificial Sequence
  Description of Artificial Sequence: Synthetic oligonucleotide
  Target: PCSK9; (+) strand; PAM type: YTN; PAM sequence: CTG
tggtgcaaccctagactctc

SEQ ID NO: 28119 - DNA, 20 bp, Artificial Sequence
  Description of Artificial Sequence: Synthetic oligonucleotide
  Target: PCSK9; (+) strand; PAM type: YTN; PAM sequence: CTA
gactctctctccttcccctc

SEQ ID NO: 28120 - DNA, 20 bp, Artificial Sequence
  Description of Artificial Sequence: Synthetic oligonucleotide
  Target: PCSK9; (+) strand; PAM type: YTN; PAM sequence: CTC
tctctccttcccctccacag

SEQ ID NO: 28121 - DNA, 20 bp, Artificial Sequence
  Description of Artificial Sequence: Synthetic oligonucleotide
  Target: PCSK9; (+) strand; PAM type: YTN; PAM sequence: CTC
tctccttcccctccacagaa

SEQ ID NO: 28122 - DNA, 20 bp, Artificial Sequence
  Description of Artificial Sequence: Synthetic oligonucleotide
  Target: PCSK9; (+) strand; PAM type: YTN; PAM sequence: CTC
tccttcccctccacagaatc

SEQ ID NO: 28123 - DNA, 20 bp, Artificial Sequence
  Description of Artificial Sequence: Synthetic oligonucleotide
  Target: PCSK9; (+) strand; PAM type: YTN; PAM sequence: CTC
cttcccctccacagaatcaa

SEQ ID NO: 28124 - DNA, 20 bp, Artificial Sequence
  Description of Artificial Sequence: Synthetic oligonucleotide
  Target: PCSK9; (+) strand; PAM type: YTN; PAM sequence: CTT
cccctccacagaatcaagta

SEQ ID NO: 28125 - DNA, 20 bp, Artificial Sequence
  Description of Artificial Sequence: Synthetic oligonucleotide
  Target: PCSK9; (+) strand; PAM type: YTN; PAM sequence: TTC
ccctccacagaatcaagtat

SEQ ID NO: 28126 - DNA, 20 bp, Artificial Sequence
  Description of Artificial Sequence: Synthetic oligonucleotide
  Target: PCSK9; (+) strand; PAM type: YTN; PAM sequence: CTC
cacagaatcaagtatcagct

SEQ ID NO: 28127 - DNA, 20 bp, Artificial Sequence
  Description of Artificial Sequence: Synthetic oligonucleotide
  Target: PCSK9; (+) strand; PAM type: YTN; PAM sequence: CTG
gttagagatccacaccctga

SEQ ID NO: 28128 - DNA, 20 bp, Artificial Sequence
  Description of Artificial Sequence: Synthetic oligonucleotide
  Target: PCSK9; (+) strand; PAM type: YTN; PAM sequence: TTA
gagatccacaccctgacagc

SEQ ID NO: 28129 - DNA, 20 bp, Artificial Sequence
  Description of Artificial Sequence: Synthetic oligonucleotide
  Target: PCSK9; (+) strand; PAM type: YTN; PAM sequence: CTG
acagctctgtgatgttggaa

SEQ ID NO: 28130 - DNA, 20 bp, Artificial Sequence
  Description of Artificial Sequence: Synthetic oligonucleotide
  Target: PCSK9; (+) strand; PAM type: YTN; PAM sequence: CTC
tgtgatgttggaacaacttg

SEQ ID NO: 28131 - DNA, 20 bp, Artificial Sequence
  Description of Artificial Sequence: Synthetic oligonucleotide
  Target: PCSK9; (+) strand; PAM type: YTN; PAM sequence: CTG
tgatgttggaacaacttggt

SEQ ID NO: 28132 - DNA, 20 bp, Artificial Sequence
  Description of Artificial Sequence: Synthetic oligonucleotide
  Target: PCSK9; (+) strand; PAM type: YTN; PAM sequence: TTG
gaacaacttggttcttgcag

SEQ ID NO: 28133 - DNA, 20 bp, Artificial Sequence
  Description of Artificial Sequence: Synthetic oligonucleotide
  Target: PCSK9; (+) strand; PAM type: YTN; PAM sequence: CTT
ggttcttgcagagggttagc

SEQ ID NO: 28134 - DNA, 20 bp, Artificial Sequence
  Description of Artificial Sequence: Synthetic oligonucleotide
  Target: PCSK9; (+) strand; PAM type: YTN; PAM sequence: TTG
gttcttgcagagggttagca

SEQ ID NO: 28135 - DNA, 20 bp, Artificial Sequence
  Description of Artificial Sequence: Synthetic oligonucleotide
  Target: PCSK9; (+) strand; PAM type: YTN; PAM sequence: TTC
ttgcagagggttagcaggtg

SEQ ID NO: 28136 - DNA, 20 bp, Artificial Sequence
  Description of Artificial Sequence: Synthetic oligonucleotide
  Target: PCSK9; (+) strand; PAM type: YTN; PAM sequence: CTT
gcagagggttagcaggtggt

SEQ ID NO: 28137 - DNA, 20 bp, Artificial Sequence
  Description of Artificial Sequence: Synthetic oligonucleotide
  Target: PCSK9; (+) strand; PAM type: YTN; PAM sequence: TTG
cagagggttagcaggtggtc

SEQ ID NO: 28138 - DNA, 20 bp, Artificial Sequence
  Description of Artificial Sequence: Synthetic oligonucleotide
  Target: PCSK9; (+) strand; PAM type: YTN; PAM sequence: TTA
gcaggtggtcaccagggatc

SEQ ID NO: 28139 - DNA, 20 bp, Artificial Sequence
  Description of Artificial Sequence: Synthetic oligonucleotide
  Target: PCSK9; (+) strand; PAM type: YTN; PAM sequence: CTT
gcaggaaggcgaaaatctgg

SEQ ID NO: 28140 - DNA, 20 bp, Artificial Sequence
  Description of Artificial Sequence: Synthetic oligonucleotide
  Target: PCSK9; (+) strand; PAM type: YTN; PAM sequence: TTG
caggaaggcgaaaatctgga

SEQ ID NO: 28141 - DNA, 20 bp, Artificial Sequence
  Description of Artificial Sequence: Synthetic oligonucleotide
  Target: PCSK9; (+) strand; PAM type: YTN; PAM sequence: CTG
gactagcaaatagggaaggg

SEQ ID NO: 28142 - DNA, 20 bp, Artificial Sequence
  Description of Artificial Sequence: Synthetic oligonucleotide
  Target: PCSK9; (+) strand; PAM type: YTN; PAM sequence: CTA
gcaaatagggaaggggaccc

SEQ ID NO: 28143 - DNA, 20 bp, Artificial Sequence
  Description of Artificial Sequence: Synthetic oligonucleotide
  Target: PCSK9; (+) strand; PAM type: YTN; PAM sequence: CTG
gccactaggaatgagactga

SEQ ID NO: 28144 - DNA, 20 bp, Artificial Sequence
  Description of Artificial Sequence: Synthetic oligonucleotide
  Target: PCSK9; (+) strand; PAM type: YTN; PAM sequence: CTA
ggaatgagactgagacctgt

SEQ ID NO: 28145 - DNA, 20 bp, Artificial Sequence
  Description of Artificial Sequence: Synthetic oligonucleotide
  Target: PCSK9; (+) strand; PAM type: YTN; PAM sequence: CTG
agacctgtgggatctagcaa

SEQ ID NO: 28146 - DNA, 20 bp, Artificial Sequence
  Description of Artificial Sequence: Synthetic oligonucleotide
  Target: PCSK9; (+) strand; PAM type: YTN; PAM sequence: CTG
tgggatctagcaagaagccc

SEQ ID NO: 28147 - DNA, 20 bp, Artificial Sequence
  Description of Artificial Sequence: Synthetic oligonucleotide
  Target: PCSK9; (+) strand; PAM type: YTN; PAM sequence: CTA
gcaagaagcccagtgtgacc

SEQ ID NO: 28148 - DNA, 20 bp, Artificial Sequence
  Description of Artificial Sequence: Synthetic oligonucleotide
  Target: PCSK9; (+) strand; PAM type: YTN; PAM sequence: CTA
tgctggggaccacttgggag

SEQ ID NO: 28149 - DNA, 20 bp, Artificial Sequence
  Description of Artificial Sequence: Synthetic oligonucleotide
  Target: PCSK9; (+) strand; PAM type: YTN; PAM sequence: CTG
gggaccacttgggagagcca

SEQ ID NO: 28150 - DNA, 20 bp, Artificial Sequence
  Description of Artificial Sequence: Synthetic oligonucleotide
  Target: PCSK9; (+) strand; PAM type: YTN; PAM sequence: CTT
gggagagccaaaagctttgg

SEQ ID NO: 28151 - DNA, 20 bp, Artificial Sequence
  Description of Artificial Sequence: Synthetic oligonucleotide
  Target: PCSK9; (+) strand; PAM type: YTN; PAM sequence: TTG
ggagagccaaaagctttggt

SEQ ID NO: 28152 - DNA, 20 bp, Artificial Sequence
  Description of Artificial Sequence: Synthetic oligonucleotide
  Target: PCSK9; (+) strand; PAM type: YTN; PAM sequence: CTT
tggtggagatgaatggagac

SEQ ID NO: 28153 - DNA, 20 bp, Artificial Sequence
  Description of Artificial Sequence: Synthetic oligonucleotide
  Target: PCSK9; (+) strand; PAM type: YTN; PAM sequence: TTT
ggtggagatgaatggagacc

SEQ ID NO: 28154 - DNA, 20 bp, Artificial Sequence
  Description of Artificial Sequence: Synthetic oligonucleotide
  Target: PCSK9; (+) strand; PAM type: YTN; PAM sequence: TTG
gtggagatgaatggagacca

SEQ ID NO: 28155 - DNA, 20 bp, Artificial Sequence
  Description of Artificial Sequence: Synthetic oligonucleotide
  Target: PCSK9; (+) strand; PAM type: YTN; PAM sequence: CTA
agttcagcatcctcctctaa

SEQ ID NO: 28156 - DNA, 20 bp, Artificial Sequence
  Description of Artificial Sequence: Synthetic oligonucleotide
  Target: PCSK9; (+) strand; PAM type: YTN; PAM sequence: TTC
agcatcctcctctaagcttt

SEQ ID NO: 28157 - DNA, 20 bp, Artificial Sequence
  Description of Artificial Sequence: Synthetic oligonucleotide
  Target: PCSK9; (+) strand; PAM type: YTN; PAM sequence: CTC
ctctaagctttgcagatgaa

SEQ ID NO: 28158 - DNA, 20 bp, Artificial Sequence
  Description of Artificial Sequence: Synthetic oligonucleotide
  Target: PCSK9; (+) strand; PAM type: YTN; PAM sequence: CTC
taagctttgcagatgaatcc

SEQ ID NO: 28159 - DNA, 20 bp, Artificial Sequence
  Description of Artificial Sequence: Synthetic oligonucleotide
  Target: PCSK9; (+) strand; PAM type: YTN; PAM sequence: CTA
agctttgcagatgaatcctg

SEQ ID NO: 28160 - DNA, 20 bp, Artificial Sequence
  Description of Artificial Sequence: Synthetic oligonucleotide
  Target: PCSK9; (+) strand; PAM type: YTN; PAM sequence: CTT
tgcagatgaatcctgaaatg

SEQ ID NO: 28161 - DNA, 20 bp, Artificial Sequence
  Description of Artificial Sequence: Synthetic oligonucleotide
  Target: PCSK9; (+) strand; PAM type: YTN; PAM sequence: TTT
gcagatgaatcctgaaatgg

SEQ ID NO: 28162 - DNA, 20 bp, Artificial Sequence
  Description of Artificial Sequence: Synthetic oligonucleotide
  Target: PCSK9; (+) strand; PAM type: YTN; PAM sequence: TTG
cagatgaatcctgaaatggt

SEQ ID NO: 28163 - DNA, 20 bp, Artificial Sequence
  Description of Artificial Sequence: Synthetic oligonucleotide
  Target: PCSK9; (+) strand; PAM type: YTN; PAM sequence: CTG
aaatggtcagcccctccaga

SEQ ID NO: 28164 - DNA, 20 bp, Artificial Sequence
  Description of Artificial Sequence: Synthetic oligonucleotide
  Target: PCSK9; (+) strand; PAM type: YTN; PAM sequence: CTC
cagagaaaagaacagcaaca

SEQ ID NO: 28165 - DNA, 20 bp, Artificial Sequence
  Description of Artificial Sequence: Synthetic oligonucleotide
  Target: PCSK9; (+) strand; PAM type: YTN; PAM sequence: CTC
agaggacccacagtcccctt

SEQ ID NO: 28166 - DNA, 20 bp, Artificial Sequence
  Description of Artificial Sequence: Synthetic oligonucleotide
  Target: PCSK9; (+) strand; PAM type: YTN; PAM sequence: CTT
tattagtgtaaagtactaag

SEQ ID NO: 28167 - DNA, 20 bp, Artificial Sequence
  Description of Artificial Sequence: Synthetic oligonucleotide
  Target: PCSK9; (+) strand; PAM type: YTN; PAM sequence: TTT
attagtgtaaagtactaaga

SEQ ID NO: 28168 - DNA, 20 bp, Artificial Sequence
  Description of Artificial Sequence: Synthetic oligonucleotide
  Target: PCSK9; (+) strand; PAM type: YTN; PAM sequence: TTA
ttagtgtaaagtactaagag

SEQ ID NO: 28169 - DNA, 20 bp, Artificial Sequence
  Description of Artificial Sequence: Synthetic oligonucleotide
  Target: PCSK9; (+) strand; PAM type: YTN; PAM sequence: TTA
gtgtaaagtactaagaggaa

SEQ ID NO: 28170 - DNA, 20 bp, Artificial Sequence
  Description of Artificial Sequence: Synthetic oligonucleotide
  Target: PCSK9; (+) strand; PAM type: YTN; PAM sequence: CTA
agaggaatcaacagcattta

SEQ ID NO: 28171 - DNA, 20 bp, Artificial Sequence
  Description of Artificial Sequence: Synthetic oligonucleotide
  Target: PCSK9; (+) strand; PAM type: YTN; PAM sequence: TTT
agcaccaggcacaggctcgt

SEQ ID NO: 28172 - DNA, 20 bp, Artificial Sequence
  Description of Artificial Sequence: Synthetic oligonucleotide
  Target: PCSK9; (+) strand; PAM type: YTN; PAM sequence: TTA
gcaccaggcacaggctcgtg

SEQ ID NO: 28173 - DNA, 20 bp, Artificial Sequence
  Description of Artificial Sequence: Synthetic oligonucleotide
  Target: PCSK9; (+) strand; PAM type: YTN; PAM sequence: CTC
gtgttcccccgcccactacg

SEQ ID NO: 28174 - DNA, 20 bp, Artificial Sequence
  Description of Artificial Sequence: Synthetic oligonucleotide
  Target: PCSK9; (+) strand; PAM type: YTN; PAM sequence: TTC
ccccgcccactacggctgtg

SEQ ID NO: 28175 - DNA, 20 bp, Artificial Sequence
  Description of Artificial Sequence: Synthetic oligonucleotide
  Target: PCSK9; (+) strand; PAM type: YTN; PAM sequence: CTA
cggctgtgttctgatatatg

SEQ ID NO: 28176 - DNA, 20 bp, Artificial Sequence
  Description of Artificial Sequence: Synthetic oligonucleotide
  Target: PCSK9; (+) strand; PAM type: YTN; PAM sequence: CTG
tgttctgatatatgaagaat

SEQ ID NO: 28177 - DNA, 20 bp, Artificial Sequence
  Description of Artificial Sequence: Synthetic oligonucleotide
  Target: PCSK9; (+) strand; PAM type: YTN; PAM sequence: TTC
tgatatatgaagaatggcgg

SEQ ID NO: 28178 - DNA, 20 bp, Artificial Sequence
  Description of Artificial Sequence: Synthetic oligonucleotide
  Target: PCSK9; (+) strand; PAM type: YTN; PAM sequence: CTG
atatatgaagaatggcggca

SEQ ID NO: 28179 - DNA, 20 bp, Artificial Sequence
  Description of Artificial Sequence: Synthetic oligonucleotide
  Target: PCSK9; (+) strand; PAM type: YTN; PAM sequence: CTC
caactctgtttttgaaaaat

SEQ ID NO: 28180 - DNA, 20 bp, Artificial Sequence
  Description of Artificial Sequence: Synthetic oligonucleotide
  Target: PCSK9; (+) strand; PAM type: YTN; PAM sequence: CTC
tgtttttgaaaaatttattt

SEQ ID NO: 28181 - DNA, 20 bp, Artificial Sequence
  Description of Artificial Sequence: Synthetic oligonucleotide
  Target: PCSK9; (+) strand; PAM type: YTN; PAM sequence: CTG
tttttgaaaaatttatttta

SEQ ID NO: 28182 - DNA, 20 bp, Artificial Sequence
  Description of Artificial Sequence: Synthetic oligonucleotide
  Target: PCSK9; (+) strand; PAM type: YTN; PAM sequence: TTT
ttgaaaaatttattttatac

SEQ ID NO: 28183 - DNA, 20 bp, Artificial Sequence
  Description of Artificial Sequence: Synthetic oligonucleotide
  Target: PCSK9; (+) strand; PAM type: YTN; PAM sequence: TTT
tgaaaaatttattttatact

SEQ ID NO: 28184 - DNA, 20 bp, Artificial Sequence
  Description of Artificial Sequence: Synthetic oligonucleotide
  Target: PCSK9; (+) strand; PAM type: YTN; PAM sequence: TTT
gaaaaatttattttatactc

SEQ ID NO: 28185 - DNA, 20 bp, Artificial Sequence
  Description of Artificial Sequence: Synthetic oligonucleotide
  Target: PCSK9; (+) strand; PAM type: YTN; PAM sequence: TTG
aaaaatttattttatactct

SEQ ID NO: 28186 - DNA, 20 bp, Artificial Sequence
  Description of Artificial Sequence: Synthetic oligonucleotide
  Target: PCSK9; (+) strand; PAM type: YTN; PAM sequence: TTT
attttatactcttagaagct

SEQ ID NO: 28187 - DNA, 20 bp, Artificial Sequence
  Description of Artificial Sequence: Synthetic oligonucleotide
  Target: PCSK9; (+) strand; PAM type: YTN; PAM sequence: TTA
ttttatactcttagaagcta

SEQ ID NO: 28188 - DNA, 20 bp, Artificial Sequence
  Description of Artificial Sequence: Synthetic oligonucleotide
  Target: PCSK9; (+) strand; PAM type: YTN; PAM sequence: TTT
tatactcttagaagctaaga

SEQ ID NO: 28189 - DNA, 20 bp, Artificial Sequence
  Description of Artificial Sequence: Synthetic oligonucleotide
  Target: PCSK9; (+) strand; PAM type: YTN; PAM sequence: TTT
atactcttagaagctaagaa

SEQ ID NO: 28190 - DNA, 20 bp, Artificial Sequence
  Description of Artificial Sequence: Synthetic oligonucleotide
  Target: PCSK9; (+) strand; PAM type: YTN; PAM sequence: TTA
tactcttagaagctaagaac

SEQ ID NO: 28191 - DNA, 20 bp, Artificial Sequence
  Description of Artificial Sequence: Synthetic oligonucleotide
  Target: PCSK9; (+) strand; PAM type: YTN; PAM sequence: CTC
ttagaagctaagaactttgc

SEQ ID NO: 28192 - DNA, 20 bp, Artificial Sequence
  Description of Artificial Sequence: Synthetic oligonucleotide
  Target: PCSK9; (+) strand; PAM type: YTN; PAM sequence: CTT
agaagctaagaactttgcca

SEQ ID NO: 28193 - DNA, 20 bp, Artificial Sequence
  Description of Artificial Sequence: Synthetic oligonucleotide
  Target: PCSK9; (+) strand; PAM type: YTN; PAM sequence: TTA
gaagctaagaactttgccac

SEQ ID NO: 28194 - DNA, 20 bp, Artificial Sequence
  Description of Artificial Sequence: Synthetic oligonucleotide
  Target: PCSK9; (+) strand; PAM type: YTN; PAM sequence: CTA
agaactttgccacacatgaa

SEQ ID NO: 28195 - DNA, 20 bp, Artificial Sequence
  Description of Artificial Sequence: Synthetic oligonucleotide
  Target: PCSK9; (+) strand; PAM type: YTN; PAM sequence: CTT
tgccacacatgaaccaaatt

SEQ ID NO: 28196 - DNA, 20 bp, Artificial Sequence
  Description of Artificial Sequence: Synthetic oligonucleotide
  Target: PCSK9; (+) strand; PAM type: YTN; PAM sequence: TTT
gccacacatgaaccaaattt

SEQ ID NO: 28197 - DNA, 20 bp, Artificial Sequence
  Description of Artificial Sequence: Synthetic oligonucleotide
  Target: PCSK9; (+) strand; PAM type: YTN; PAM sequence: TTG
ccacacatgaaccaaattta

SEQ ID NO: 28198 - DNA, 20 bp, Artificial Sequence
  Description of Artificial Sequence: Synthetic oligonucleotide
  Target: PCSK9; (+) strand; PAM type: YTN; PAM sequence: TTT
agaattaaggttcttcccta

SEQ ID NO: 28199 - DNA, 20 bp, Artificial Sequence
  Description of Artificial Sequence: Synthetic oligonucleotide
  Target: PCSK9; (+) strand; PAM type: YTN; PAM sequence: TTA
gaattaaggttcttccctag

SEQ ID NO: 28200 - DNA, 20 bp, Artificial Sequence
  Description of Artificial Sequence: Synthetic oligonucleotide
  Target: PCSK9; (+) strand; PAM type: YTN; PAM sequence: TTA
aggttcttccctagtgtatc

SEQ ID NO: 28201 - DNA, 20 bp, Artificial Sequence
  Description of Artificial Sequence: Synthetic oligonucleotide
  Target: PCSK9; (+) strand; PAM type: YTN; PAM sequence: TTC
ttccctagtgtatctacttc

SEQ ID NO: 28202 - DNA, 20 bp, Artificial Sequence
  Description of Artificial Sequence: Synthetic oligonucleotide
  Target: PCSK9; (+) strand; PAM type: YTN; PAM sequence: CTT
ccctagtgtatctacttcct

SEQ ID NO: 28203 - DNA, 20 bp, Artificial Sequence
  Description of Artificial Sequence: Synthetic oligonucleotide
  Target: PCSK9; (+) strand; PAM type: YTN; PAM sequence: TTC
cctagtgtatctacttcctt

SEQ ID NO: 28204 - DNA, 20 bp, Artificial Sequence
  Description of Artificial Sequence: Synthetic oligonucleotide
  Target: PCSK9; (+) strand; PAM type: YTN; PAM sequence: CTA
gtgtatctacttccttttga

SEQ ID NO: 28205 - DNA, 20 bp, Artificial Sequence
  Description of Artificial Sequence: Synthetic oligonucleotide
  Target: PCSK9; (+) strand; PAM type: YTN; PAM sequence: CTA
cttccttttgaaattttata

SEQ ID NO: 28206 - DNA, 20 bp, Artificial Sequence
  Description of Artificial Sequence: Synthetic oligonucleotide
  Target: PCSK9; (+) strand; PAM type: YTN; PAM sequence: CTT
ccttttgaaattttataaac

SEQ ID NO: 28207 - DNA, 20 bp, Artificial Sequence
  Description of Artificial Sequence: Synthetic oligonucleotide
  Target: PCSK9; (+) strand; PAM type: YTN; PAM sequence: TTC
cttttgaaattttataaaca

SEQ ID NO: 28208 - DNA, 20 bp, Artificial Sequence
  Description of Artificial Sequence: Synthetic oligonucleotide
  Target: PCSK9; (+) strand; PAM type: YTN; PAM sequence: CTT
ttgaaattttataaacaaga

SEQ ID NO: 28209 - DNA, 20 bp, Artificial Sequence
  Description of Artificial Sequence: Synthetic oligonucleotide
  Target: PCSK9; (+) strand; PAM type: YTN; PAM sequence: TTT
tgaaattttataaacaagat

SEQ ID NO: 28210 - DNA, 20 bp, Artificial Sequence
  Description of Artificial Sequence: Synthetic oligonucleotide
  Target: PCSK9; (+) strand; PAM type: YTN; PAM sequence: TTT
gaaattttataaacaagatt

SEQ ID NO: 28211 - DNA, 20 bp, Artificial Sequence
  Description of Artificial Sequence: Synthetic oligonucleotide
  Target: PCSK9; (+) strand; PAM type: YTN; PAM sequence: TTG
aaattttataaacaagattt

SEQ ID NO: 28212 - DNA, 20 bp, Artificial Sequence
  Description of Artificial Sequence: Synthetic oligonucleotide
  Target: PCSK9; (+) strand; PAM type: YTN; PAM sequence: TTT
tataaacaagattttataca

SEQ ID NO: 28213 - DNA, 20 bp, Artificial Sequence
  Description of Artificial Sequence: Synthetic oligonucleotide
  Target: PCSK9; (+) strand; PAM type: YTN; PAM sequence: TTT
ataaacaagattttatacac

SEQ ID NO: 28214 - DNA, 20 bp, Artificial Sequence
  Description of Artificial Sequence: Synthetic oligonucleotide
  Target: PCSK9; (+) strand; PAM type: YTN; PAM sequence: TTA
taaacaagattttatacaca

SEQ ID NO: 28215 - DNA, 20 bp, Artificial Sequence
  Description of Artificial Sequence: Synthetic oligonucleotide
  Target: PCSK9; (+) strand; PAM type: YTN; PAM sequence: TTT
tatacacaagaggtagcaga

SEQ ID NO: 28216 - DNA, 20 bp, Artificial Sequence
  Description of Artificial Sequence: Synthetic oligonucleotide
  Target: PCSK9; (+) strand; PAM type: YTN; PAM sequence: TTT
atacacaagaggtagcagag

SEQ ID NO: 28217 - DNA, 20 bp, Artificial Sequence
  Description of Artificial Sequence: Synthetic oligonucleotide
  Target: PCSK9; (+) strand; PAM type: YTN; PAM sequence: TTA
tacacaagaggtagcagagg

SEQ ID NO: 28218 - DNA, 20 bp, Artificial Sequence
  Description of Artificial Sequence: Synthetic oligonucleotide
  Target: PCSK9; (+) strand; PAM type: YTN; PAM sequence: TTC
cagtctgcttgttccaagct

SEQ ID NO: 28219 - DNA, 20 bp, Artificial Sequence
  Description of Artificial Sequence: Synthetic oligonucleotide
  Target: PCSK9; (+) strand; PAM type: YTN; PAM sequence: CTG
cttgttccaagctcagaagg

SEQ ID NO: 28220 - DNA, 20 bp, Artificial Sequence
  Description of Artificial Sequence: Synthetic oligonucleotide
  Target: PCSK9; (+) strand; PAM type: YTN; PAM sequence: CTT
gttccaagctcagaaggtaa

SEQ ID NO: 28221 - DNA, 20 bp, Artificial Sequence
  Description of Artificial Sequence: Synthetic oligonucleotide
  Target: PCSK9; (+) strand; PAM type: YTN; PAM sequence: TTG
ttccaagctcagaaggtaac

SEQ ID NO: 28222 - DNA, 20 bp, Artificial Sequence
  Description of Artificial Sequence: Synthetic oligonucleotide
  Target: PCSK9; (+) strand; PAM type: YTN; PAM sequence: TTC
caagctcagaaggtaactgc

SEQ ID NO: 28223 - DNA, 20 bp, Artificial Sequence
  Description of Artificial Sequence: Synthetic oligonucleotide
  Target: PCSK9; (+) strand; PAM type: YTN; PAM sequence: CTC
agaaggtaactgcacacacc

SEQ ID NO: 28224 - DNA, 20 bp, Artificial Sequence
  Description of Artificial Sequence: Synthetic oligonucleotide
  Target: PCSK9; (+) strand; PAM type: YTN; PAM sequence: CTG
cacacacctcgatgttagca

SEQ ID NO: 28225 - DNA, 20 bp, Artificial Sequence
  Description of Artificial Sequence: Synthetic oligonucleotide
  Target: PCSK9; (+) strand; PAM type: YTN; PAM sequence: CTC
gatgttagcagggaaggtgg

SEQ ID NO: 28226 - DNA, 20 bp, Artificial Sequence
  Description of Artificial Sequence: Synthetic oligonucleotide
  Target: PCSK9; (+) strand; PAM type: YTN; PAM sequence: TTA
gcagggaaggtggggcagga

SEQ ID NO: 28227 - DNA, 20 bp, Artificial Sequence
  Description of Artificial Sequence: Synthetic oligonucleotide
  Target: PCSK9; (+) strand; PAM type: YTN; PAM sequence: CTG
atgatacggcactctagttc

SEQ ID NO: 28228 - DNA, 20 bp, Artificial Sequence
  Description of Artificial Sequence: Synthetic oligonucleotide
  Target: PCSK9; (+) strand; PAM type: YTN; PAM sequence: CTC
tagttcctaaaactgactgt

SEQ ID NO: 28229 - DNA, 20 bp, Artificial Sequence
  Description of Artificial Sequence: Synthetic oligonucleotide
  Target: PCSK9; (+) strand; PAM type: YTN; PAM sequence: CTA
gttcctaaaactgactgtag

SEQ ID NO: 28230 - DNA, 20 bp, Artificial Sequence
  Description of Artificial Sequence: Synthetic oligonucleotide
  Target: PCSK9; (+) strand; PAM type: YTN; PAM sequence: TTC
ctaaaactgactgtagttgt

SEQ ID NO: 28231 - DNA, 20 bp, Artificial Sequence
  Description of Artificial Sequence: Synthetic oligonucleotide
  Target: PCSK9; (+) strand; PAM type: YTN; PAM sequence: CTA
aaactgactgtagttgtcag

SEQ ID NO: 28232 - DNA, 20 bp, Artificial Sequence
  Description of Artificial Sequence: Synthetic oligonucleotide
  Target: PCSK9; (+) strand; PAM type: YTN; PAM sequence: CTG
actgtagttgtcagtgaccg

SEQ ID NO: 28233 - DNA, 20 bp, Artificial Sequence
  Description of Artificial Sequence: Synthetic oligonucleotide
  Target: PCSK9; (+) strand; PAM type: YTN; PAM sequence: CTG
tagttgtcagtgaccgtgtg

SEQ ID NO: 28234 - DNA, 20 bp, Artificial Sequence
  Description of Artificial Sequence: Synthetic oligonucleotide
  Target: PCSK9; (+) strand; PAM type: YTN; PAM sequence: TTG
tcagtgaccgtgtgaggact

SEQ ID NO: 28235 - DNA, 20 bp, Artificial Sequence
  Description of Artificial Sequence: Synthetic oligonucleotide
  Target: PCSK9; (+) strand; PAM type: YTN; PAM sequence: CTC
caggagaagtcgtggtgaga

SEQ ID NO: 28236 - DNA, 20 bp, Artificial Sequence
  Description of Artificial Sequence: Synthetic oligonucleotide
  Target: PCSK9; (+) strand; PAM type: YTN; PAM sequence: CTG
ggatgcttgttttctttccc

SEQ ID NO: 28237 - DNA, 20 bp, Artificial Sequence
  Description of Artificial Sequence: Synthetic oligonucleotide
  Target: PCSK9; (+) strand; PAM type: YTN; PAM sequence: CTT
gttttctttcccaggatgcc

SEQ ID NO: 28238 - DNA, 20 bp, Artificial Sequence
  Description of Artificial Sequence: Synthetic oligonucleotide
  Target: PCSK9; (+) strand; PAM type: YTN; PAM sequence: TTG
ttttctttcccaggatgcct

SEQ ID NO: 28239 - DNA, 20 bp, Artificial Sequence
  Description of Artificial Sequence: Synthetic oligonucleotide
  Target: PCSK9; (+) strand; PAM type: YTN; PAM sequence: TTT
tctttcccaggatgccttca

SEQ ID NO: 28240 - DNA, 20 bp, Artificial Sequence
  Description of Artificial Sequence: Synthetic oligonucleotide
  Target: PCSK9; (+) strand; PAM type: YTN; PAM sequence: TTT
ctttcccaggatgccttcaa

SEQ ID NO: 28241 - DNA, 20 bp, Artificial Sequence
  Description of Artificial Sequence: Synthetic oligonucleotide
  Target: PCSK9; (+) strand; PAM type: YTN; PAM sequence: TTC
tttcccaggatgccttcaac

SEQ ID NO: 28242 - DNA, 20 bp, Artificial Sequence
  Description of Artificial Sequence: Synthetic oligonucleotide
  Target: PCSK9; (+) strand; PAM type: YTN; PAM sequence: CTT
tcccaggatgccttcaacgg

SEQ ID NO: 28243 - DNA, 20 bp, Artificial Sequence
  Description of Artificial Sequence: Synthetic oligonucleotide
  Target: PCSK9; (+) strand; PAM type: YTN; PAM sequence: TTT
cccaggatgccttcaacggg

SEQ ID NO: 28244 - DNA, 20 bp, Artificial Sequence
  Description of Artificial Sequence: Synthetic oligonucleotide
  Target: PCSK9; (+) strand; PAM type: YTN; PAM sequence: TTC
ccaggatgccttcaacgggc

SEQ ID NO: 28245 - DNA, 20 bp, Artificial Sequence
  Description of Artificial Sequence: Synthetic oligonucleotide
  Target: PCSK9; (+) strand; PAM type: YTN; PAM sequence: CTT
caacgggcagaatcggccat

SEQ ID NO: 28246 - DNA, 20 bp, Artificial Sequence
  Description of Artificial Sequence: Synthetic oligonucleotide
  Target: PCSK9; (+) strand; PAM type: YTN; PAM sequence: TTC
aacgggcagaatcggccatc

SEQ ID NO: 28247 - DNA, 20 bp, Artificial Sequence
  Description of Artificial Sequence: Synthetic oligonucleotide
  Target: PCSK9; (+) strand; PAM type: YTN; PAM sequence: CTT
aagatcggcctcactaaggg

SEQ ID NO: 28248 - DNA, 20 bp, Artificial Sequence
  Description of Artificial Sequence: Synthetic oligonucleotide
  Target: PCSK9; (+) strand; PAM type: YTN; PAM sequence: TTA
agatcggcctcactaaggga

SEQ ID NO: 28249 - DNA, 20 bp, Artificial Sequence
  Description of Artificial Sequence: Synthetic oligonucleotide
  Target: PCSK9; (+) strand; PAM type: YTN; PAM sequence: CTC
actaagggagcttcttgaga

SEQ ID NO: 28250 - DNA, 20 bp, Artificial Sequence
  Description of Artificial Sequence: Synthetic oligonucleotide
  Target: PCSK9; (+) strand; PAM type: YTN; PAM sequence: CTA
agggagcttcttgagaacac

SEQ ID NO: 28251 - DNA, 20 bp, Artificial Sequence
  Description of Artificial Sequence: Synthetic oligonucleotide
  Target: PCSK9; (+) strand; PAM type: YTN; PAM sequence: CTT
cttgagaacacacagcatta

SEQ ID NO: 28252 - DNA, 20 bp, Artificial Sequence
  Description of Artificial Sequence: Synthetic oligonucleotide
  Target: PCSK9; (+) strand; PAM type: YTN; PAM sequence: TTC
ttgagaacacacagcattat

SEQ ID NO: 28253 - DNA, 20 bp, Artificial Sequence
  Description of Artificial Sequence: Synthetic oligonucleotide
  Target: PCSK9; (+) strand; PAM type: YTN; PAM sequence: CTT
gagaacacacagcattattg

SEQ ID NO: 28254 - DNA, 20 bp, Artificial Sequence
  Description of Artificial Sequence: Synthetic oligonucleotide
  Target: PCSK9; (+) strand; PAM type: YTN; PAM sequence: TTG
agaacacacagcattattga

SEQ ID NO: 28255 - DNA, 20 bp, Artificial Sequence
  Description of Artificial Sequence: Synthetic oligonucleotide
  Target: PCSK9; (+) strand; PAM type: YTN; PAM sequence: TTA
ttgagttaattgtgcaattc

SEQ ID NO: 28256 - DNA, 20 bp, Artificial Sequence
  Description of Artificial Sequence: Synthetic oligonucleotide
  Target: PCSK9; (+) strand; PAM type: YTN; PAM sequence: TTG
agttaattgtgcaattcctg

SEQ ID NO: 28257 - DNA, 20 bp, Artificial Sequence
  Description of Artificial Sequence: Synthetic oligonucleotide
  Target: PCSK9; (+) strand; PAM type: YTN; PAM sequence: TTA
attgtgcaattcctgctctg

SEQ ID NO: 28258 - DNA, 20 bp, Artificial Sequence
  Description of Artificial Sequence: Synthetic oligonucleotide
  Target: PCSK9; (+) strand; PAM type: YTN; PAM sequence: TTG
tgcaattcctgctctgtttg

SEQ ID NO: 28259 - DNA, 20 bp, Artificial Sequence
  Description of Artificial Sequence: Synthetic oligonucleotide
  Target: PCSK9; (+) strand; PAM type: YTN; PAM sequence: TTC
ctgctctgtttgcagaccat

SEQ ID NO: 28260 - DNA, 20 bp, Artificial Sequence
  Description of Artificial Sequence: Synthetic oligonucleotide
  Target: PCSK9; (+) strand; PAM type: YTN; PAM sequence: CTG
ctctgtttgcagaccatttt

SEQ ID NO: 28261 - DNA, 20 bp, Artificial Sequence
  Description of Artificial Sequence: Synthetic oligonucleotide
  Target: PCSK9; (+) strand; PAM type: YTN; PAM sequence: CTC
tgtttgcagaccattttgaa

SEQ ID NO: 28262 - DNA, 20 bp, Artificial Sequence
  Description of Artificial Sequence: Synthetic oligonucleotide
  Target: PCSK9; (+) strand; PAM type: YTN; PAM sequence: CTG
tttgcagaccattttgaaag

SEQ ID NO: 28263 - DNA, 20 bp, Artificial Sequence
  Description of Artificial Sequence: Synthetic oligonucleotide
  Target: PCSK9; (+) strand; PAM type: YTN; PAM sequence: TTT
gcagaccattttgaaaggtt

SEQ ID NO: 28264 - DNA, 20 bp, Artificial Sequence
  Description of Artificial Sequence: Synthetic oligonucleotide
  Target: PCSK9; (+) strand; PAM type: YTN; PAM sequence: TTG
cagaccattttgaaaggttt

SEQ ID NO: 28265 - DNA, 20 bp, Artificial Sequence
  Description of Artificial Sequence: Synthetic oligonucleotide
  Target: PCSK9; (+) strand; PAM type: YTN; PAM sequence: TTT
tgaaaggtttataaaaacat

SEQ ID NO: 28266 - DNA, 20 bp, Artificial Sequence
  Description of Artificial Sequence: Synthetic oligonucleotide
  Target: PCSK9; (+) strand; PAM type: YTN; PAM sequence: TTT
gaaaggtttataaaaacatc

SEQ ID NO: 28267 - DNA, 20 bp, Artificial Sequence
  Description of Artificial Sequence: Synthetic oligonucleotide
  Target: PCSK9; (+) strand; PAM type: YTN; PAM sequence: TTG
aaaggtttataaaaacatct

SEQ ID NO: 28268 - DNA, 20 bp, Artificial Sequence
  Description of Artificial Sequence: Synthetic oligonucleotide
  Target: PCSK9; (+) strand; PAM type: YTN; PAM sequence: TTT
ataaaaacatcttcatccaa

SEQ ID NO: 28269 - DNA, 20 bp, Artificial Sequence
  Description of Artificial Sequence: Synthetic oligonucleotide
  Target: PCSK9; (+) strand; PAM type: YTN; PAM sequence: TTA
taaaaacatcttcatccaaa

SEQ ID NO: 28270 - DNA, 20 bp, Artificial Sequence
  Description of Artificial Sequence: Synthetic oligonucleotide
  Target: PCSK9; (+) strand; PAM type: YTN; PAM sequence: CTT
catccaaaaaattggcagta

SEQ ID NO: 28271 - DNA, 20 bp, Artificial Sequence
  Description of Artificial Sequence: Synthetic oligonucleotide
  Target: PCSK9; (+) strand; PAM type: YTN; PAM sequence: TTC
atccaaaaaattggcagtaa

SEQ ID NO: 28272 - DNA, 20 bp, Artificial Sequence
  Description of Artificial Sequence: Synthetic oligonucleotide
  Target: PCSK9; (+) strand; PAM type: YTN; PAM sequence: TTG
gcagtaaaaatgacaactct

SEQ ID NO: 28273 - DNA, 20 bp, Artificial Sequence
  Description of Artificial Sequence: Synthetic oligonucleotide
  Target: PCSK9; (+) strand; PAM type: YTN; PAM sequence: CTC
ttccaaggtaagcctgtcat

SEQ ID NO: 28274 - DNA, 20 bp, Artificial Sequence
  Description of Artificial Sequence: Synthetic oligonucleotide
  Target: PCSK9; (+) strand; PAM type: YTN; PAM sequence: CTT
ccaaggtaagcctgtcataa

SEQ ID NO: 28275 - DNA, 20 bp, Artificial Sequence
  Description of Artificial Sequence: Synthetic oligonucleotide
  Target: PCSK9; (+) strand; PAM type: YTN; PAM sequence: TTC
caaggtaagcctgtcataac

SEQ ID NO: 28276 - DNA, 20 bp, Artificial Sequence
  Description of Artificial Sequence: Synthetic oligonucleotide
  Target: PCSK9; (+) strand; PAM type: YTN; PAM sequence: CTG
tcataactgtcactgttgta

SEQ ID NO: 28277 - DNA, 20 bp, Artificial Sequence
  Description of Artificial Sequence: Synthetic oligonucleotide
  Target: PCSK9; (+) strand; PAM type: YTN; PAM sequence: CTG
tcactgttgtactacattaa

SEQ ID NO: 28278 - DNA, 20 bp, Artificial Sequence
  Description of Artificial Sequence: Synthetic oligonucleotide
  Target: PCSK9; (+) strand; PAM type: YTN; PAM sequence: CTG
ttgtactacattaaaaaaag

SEQ ID NO: 28279 - DNA, 20 bp, Artificial Sequence
  Description of Artificial Sequence: Synthetic oligonucleotide
  Target: PCSK9; (+) strand; PAM type: YTN; PAM sequence: TTG
tactacattaaaaaaagtca

SEQ ID NO: 28280 - DNA, 20 bp, Artificial Sequence
  Description of Artificial Sequence: Synthetic oligonucleotide
  Target: PCSK9; (+) strand; PAM type: YTN; PAM sequence: CTA
cattaaaaaaagtcatcagc

SEQ ID NO: 28281 - DNA, 20 bp, Artificial Sequence
  Description of Artificial Sequence: Synthetic oligonucleotide
  Target: PCSK9; (+) strand; PAM type: YTN; PAM sequence: TTA
aaaaaagtcatcagcaggtt

SEQ ID NO: 28282 - DNA, 20 bp, Artificial Sequence
  Description of Artificial Sequence: Synthetic oligonucleotide
  Target: PCSK9; (+) strand; PAM type: YTN; PAM sequence: TTC
attgactgtagctgtcagca

SEQ ID NO: 28283 - DNA, 20 bp, Artificial Sequence
  Description of Artificial Sequence: Synthetic oligonucleotide
  Target: PCSK9; (+) strand; PAM type: YTN; PAM sequence: TTG
actgtagctgtcagcaatca

SEQ ID NO: 28284 - DNA, 20 bp, Artificial Sequence
  Description of Artificial Sequence: Synthetic oligonucleotide
  Target: PCSK9; (+) strand; PAM type: YTN; PAM sequence: CTG
tagctgtcagcaatcaagtg

SEQ ID NO: 28285 - DNA, 20 bp, Artificial Sequence
  Description of Artificial Sequence: Synthetic oligonucleotide
  Target: PCSK9; (+) strand; PAM type: YTN; PAM sequence: CTG
tcagcaatcaagtggttacc

SEQ ID NO: 28286 - DNA, 20 bp, Artificial Sequence
  Description of Artificial Sequence: Synthetic oligonucleotide
  Target: PCSK9; (+) strand; PAM type: YTN; PAM sequence: TTA
ccagcaaagtgaaaacgatg

SEQ ID NO: 28287 - DNA, 20 bp, Artificial Sequence
  Description of Artificial Sequence: Synthetic oligonucleotide
  Target: PCSK9; (+) strand; PAM type: YTN; PAM sequence: TTG
cagcaacaatataagcaaca

SEQ ID NO: 28288 - DNA, 20 bp, Artificial Sequence
  Description of Artificial Sequence: Synthetic oligonucleotide
  Target: PCSK9; (+) strand; PAM type: YTN; PAM sequence: CTG
aagcgtataatatacacggt

SEQ ID NO: 28289 - DNA, 20 bp, Artificial Sequence
  Description of Artificial Sequence: Synthetic oligonucleotide
  Target: PCSK9; (+) strand; PAM type: YTN; PAM sequence: CTG
atgaagctttacagtgagga

SEQ ID NO: 28290 - DNA, 20 bp, Artificial Sequence
  Description of Artificial Sequence: Synthetic oligonucleotide
  Target: PCSK9; (+) strand; PAM type: YTN; PAM sequence: CTT
tacagtgaggacggcaggtg

SEQ ID NO: 28291 - DNA, 20 bp, Artificial Sequence
  Description of Artificial Sequence: Synthetic oligonucleotide
  Target: PCSK9; (+) strand; PAM type: YTN; PAM sequence: TTT
acagtgaggacggcaggtgc

SEQ ID NO: 28292 - DNA, 20 bp, Artificial Sequence
  Description of Artificial Sequence: Synthetic oligonucleotide
  Target: PCSK9; (+) strand; PAM type: YTN; PAM sequence: TTA
cagtgaggacggcaggtgct

SEQ ID NO: 28293 - DNA, 20 bp, Artificial Sequence
  Description of Artificial Sequence: Synthetic oligonucleotide
  Target: PCSK9; (+) strand; PAM type: YTN; PAM sequence: CTA
ggggtgcggaaggcgttgtt

SEQ ID NO: 28294 - DNA, 20 bp, Artificial Sequence
  Description of Artificial Sequence: Synthetic oligonucleotide
  Target: PCSK9; (+) strand; PAM type: YTN; PAM sequence: TTG
tttccataggaaataagggg

SEQ ID NO: 28295 - DNA, 20 bp, Artificial Sequence
  Description of Artificial Sequence: Synthetic oligonucleotide
  Target: PCSK9; (+) strand; PAM type: YTN; PAM sequence: TTT
ccataggaaataaggggact

SEQ ID NO: 28296 - DNA, 20 bp, Artificial Sequence
  Description of Artificial Sequence: Synthetic oligonucleotide
  Target: PCSK9; (+) strand; PAM type: YTN; PAM sequence: TTC
cataggaaataaggggacta

SEQ ID NO: 28297 - DNA, 20 bp, Artificial Sequence
  Description of Artificial Sequence: Synthetic oligonucleotide
  Target: PCSK9; (+) strand; PAM type: YTN; PAM sequence: CTA
gaagtggcaatttcactcct

SEQ ID NO: 28298 - DNA, 20 bp, Artificial Sequence
  Description of Artificial Sequence: Synthetic oligonucleotide
  Target: PCSK9; (+) strand; PAM type: YTN; PAM sequence: TTT
cactcctgattttgggctcc

SEQ ID NO: 28299 - DNA, 20 bp, Artificial Sequence
  Description of Artificial Sequence: Synthetic oligonucleotide
  Target: PCSK9; (+) strand; PAM type: YTN; PAM sequence: TTC
actcctgattttgggctcct

SEQ ID NO: 28300 - DNA, 20 bp, Artificial Sequence
  Description of Artificial Sequence: Synthetic oligonucleotide
  Target: PCSK9; (+) strand; PAM type: YTN; PAM sequence: CTC
ctgattttgggctcctgaga

SEQ ID NO: 28301 - DNA, 20 bp, Artificial Sequence
  Description of Artificial Sequence: Synthetic oligonucleotide
  Target: PCSK9; (+) strand; PAM type: YTN; PAM sequence: CTG
attttgggctcctgagagtg

SEQ ID NO: 28302 - DNA, 20 bp, Artificial Sequence
  Description of Artificial Sequence: Synthetic oligonucleotide
  Target: PCSK9; (+) strand; PAM type: YTN; PAM sequence: TTT
tgggctcctgagagtgcagt

SEQ ID NO: 28303 - DNA, 20 bp, Artificial Sequence
  Description of Artificial Sequence: Synthetic oligonucleotide
  Target: PCSK9; (+) strand; PAM type: YTN; PAM sequence: TTT
gggctcctgagagtgcagtc

SEQ ID NO: 28304 - DNA, 20 bp, Artificial Sequence
  Description of Artificial Sequence: Synthetic oligonucleotide
  Target: PCSK9; (+) strand; PAM type: YTN; PAM sequence: TTG
ggctcctgagagtgcagtcg

SEQ ID NO: 28305 - DNA, 20 bp, Artificial Sequence
  Description of Artificial Sequence: Synthetic oligonucleotide
  Target: PCSK9; (+) strand; PAM type: YTN; PAM sequence: CTC
ctgagagtgcagtcgccagc

SEQ ID NO: 28306 - DNA, 20 bp, Artificial Sequence
  Description of Artificial Sequence: Synthetic oligonucleotide
  Target: PCSK9; (+) strand; PAM type: YTN; PAM sequence: CTG
agagtgcagtcgccagcgat

SEQ ID NO: 28307 - DNA, 20 bp, Artificial Sequence
  Description of Artificial Sequence: Synthetic oligonucleotide
  Target: PCSK9; (+) strand; PAM type: YTN; PAM sequence: TTT
caaggtcatgtcccacacaa

SEQ ID NO: 28308 - DNA, 20 bp, Artificial Sequence
  Description of Artificial Sequence: Synthetic oligonucleotide
  Target: PCSK9; (+) strand; PAM type: YTN; PAM sequence: TTC
aaggtcatgtcccacacaat

SEQ ID NO: 28309 - DNA, 20 bp, Artificial Sequence
  Description of Artificial Sequence: Synthetic oligonucleotide
  Target: PCSK9; (+) strand; PAM type: YTN; PAM sequence: CTC
ttggtgaggatgtgggcgga

SEQ ID NO: 28310 - DNA, 20 bp, Artificial Sequence
  Description of Artificial Sequence: Synthetic oligonucleotide
  Target: PCSK9; (+) strand; PAM type: YTN; PAM sequence: CTT
ggtgaggatgtgggcggaga

SEQ ID NO: 28311 - DNA, 20 bp, Artificial Sequence
  Description of Artificial Sequence: Synthetic oligonucleotide
  Target: PCSK9; (+) strand; PAM type: YTN; PAM sequence: TTG
gtgaggatgtgggcggagag

SEQ ID NO: 28312 - DNA, 20 bp, Artificial Sequence
  Description of Artificial Sequence: Synthetic oligonucleotide
  Target: PCSK9; (+) strand; PAM type: YTN; PAM sequence: TTC
acgtactcaaaaccaatggt

SEQ ID NO: 28313 - DNA, 20 bp, Artificial Sequence
  Description of Artificial Sequence: Synthetic oligonucleotide
  Target: PCSK9; (+) strand; PAM type: YTN; PAM sequence: CTC
aaaaccaatggtagaacatc

SEQ ID NO: 28314 - DNA, 20 bp, Artificial Sequence
  Description of Artificial Sequence: Synthetic oligonucleotide
  Target: PCSK9; (+) strand; PAM type: YTN; PAM sequence: TTT
caaactgcaagaccattgga

SEQ ID NO: 28315 - DNA, 20 bp, Artificial Sequence
  Description of Artificial Sequence: Synthetic oligonucleotide
  Target: PCSK9; (+) strand; PAM type: YTN; PAM sequence: TTC
aaactgcaagaccattggaa

SEQ ID NO: 28316 - DNA, 20 bp, Artificial Sequence
  Description of Artificial Sequence: Synthetic oligonucleotide
  Target: PCSK9; (+) strand; PAM type: YTN; PAM sequence: CTG
caagaccattggaaccgtct

SEQ ID NO: 28317 - DNA, 20 bp, Artificial Sequence
  Description of Artificial Sequence: Synthetic oligonucleotide
  Target: PCSK9; (+) strand; PAM type: YTN; PAM sequence: TTG
gaaccgtctgaagtttgcca

SEQ ID NO: 28318 - DNA, 20 bp, Artificial Sequence
  Description of Artificial Sequence: Synthetic oligonucleotide
  Target: PCSK9; (+) strand; PAM type: YTN; PAM sequence: CTG
aagtttgccactcgcctctg

SEQ ID NO: 28319 - DNA, 20 bp, Artificial Sequence
  Description of Artificial Sequence: Synthetic oligonucleotide
  Target: PCSK9; (+) strand; PAM type: YTN; PAM sequence: TTT
gccactcgcctctgtccgtt

SEQ ID NO: 28320 - DNA, 20 bp, Artificial Sequence
  Description of Artificial Sequence: Synthetic oligonucleotide
  Target: PCSK9; (+) strand; PAM type: YTN; PAM sequence: TTG
ccactcgcctctgtccgttt

SEQ ID NO: 28321 - DNA, 20 bp, Artificial Sequence
  Description of Artificial Sequence: Synthetic oligonucleotide
  Target: PCSK9; (+) strand; PAM type: YTN; PAM sequence: CTC
gcctctgtccgtttctctaa

SEQ ID NO: 28322 - DNA, 20 bp, Artificial Sequence
  Description of Artificial Sequence: Synthetic oligonucleotide
  Target: PCSK9; (+) strand; PAM type: YTN; PAM sequence: CTC
tgtccgtttctctaagggta

SEQ ID NO: 28323 - DNA, 20 bp, Artificial Sequence
  Description of Artificial Sequence: Synthetic oligonucleotide
  Target: PCSK9; (+) strand; PAM type: YTN; PAM sequence: CTG
tccgtttctctaagggtaca

SEQ ID NO: 28324 - DNA, 20 bp, Artificial Sequence
  Description of Artificial Sequence: Synthetic oligonucleotide
  Target: PCSK9; (+) strand; PAM type: YTN; PAM sequence: TTT
ctctaagggtacagttctgc

SEQ ID NO: 28325 - DNA, 20 bp, Artificial Sequence
  Description of Artificial Sequence: Synthetic oligonucleotide
  Target: PCSK9; (+) strand; PAM type: YTN; PAM sequence: TTC
tctaagggtacagttctgct

SEQ ID NO: 28326 - DNA, 20 bp, Artificial Sequence
  Description of Artificial Sequence: Synthetic oligonucleotide
  Target: PCSK9; (+) strand; PAM type: YTN; PAM sequence: CTC
taagggtacagttctgctct

SEQ ID NO: 28327 - DNA, 20 bp, Artificial Sequence
  Description of Artificial Sequence: Synthetic oligonucleotide
  Target: PCSK9; (+) strand; PAM type: YTN; PAM sequence: CTA
agggtacagttctgctctta

SEQ ID NO: 28328 - DNA, 20 bp, Artificial Sequence
  Description of Artificial Sequence: Synthetic oligonucleotide
  Target: PCSK9; (+) strand; PAM type: YTN; PAM sequence: TTC
tgctcttaagtgctggccct

SEQ ID NO: 28329 - DNA, 20 bp, Artificial Sequence
  Description of Artificial Sequence: Synthetic oligonucleotide
  Target: PCSK9; (+) strand; PAM type: YTN; PAM sequence: CTG
ctcttaagtgctggcccttc

SEQ ID NO: 28330 - DNA, 20 bp, Artificial Sequence
  Description of Artificial Sequence: Synthetic oligonucleotide
  Target: PCSK9; (+) strand; PAM type: YTN; PAM sequence: CTC
ttaagtgctggcccttccat

SEQ ID NO: 28331 - DNA, 20 bp, Artificial Sequence
  Description of Artificial Sequence: Synthetic oligonucleotide
  Target: PCSK9; (+) strand; PAM type: YTN; PAM sequence: CTT
aagtgctggcccttccatct

SEQ ID NO: 28332 - DNA, 20 bp, Artificial Sequence
  Description of Artificial Sequence: Synthetic oligonucleotide
  Target: PCSK9; (+) strand; PAM type: YTN; PAM sequence: TTA
agtgctggcccttccatctt

SEQ ID NO: 28333 - DNA, 20 bp, Artificial Sequence
  Description of Artificial Sequence: Synthetic oligonucleotide
  Target: PCSK9; (+) strand; PAM type: YTN; PAM sequence: CTG
gcccttccatcttctcagtg

SEQ ID NO: 28334 - DNA, 20 bp, Artificial Sequence
  Description of Artificial Sequence: Synthetic oligonucleotide
  Target: PCSK9; (+) strand; PAM type: YTN; PAM sequence: CTT
ccatcttctcagtgtgtttg

SEQ ID NO: 28335 - DNA, 20 bp, Artificial Sequence
  Description of Artificial Sequence: Synthetic oligonucleotide
  Target: PCSK9; (+) strand; PAM type: YTN; PAM sequence: TTC
catcttctcagtgtgtttga

SEQ ID NO: 28336 - DNA, 20 bp, Artificial Sequence
  Description of Artificial Sequence: Synthetic oligonucleotide
  Target: PCSK9; (+) strand; PAM type: YTN; PAM sequence: CTT
ctcagtgtgtttgacaaagg

SEQ ID NO: 28337 - DNA, 20 bp, Artificial Sequence
  Description of Artificial Sequence: Synthetic oligonucleotide
  Target: PCSK9; (+) strand; PAM type: YTN; PAM sequence: TTC
tcagtgtgtttgacaaaggc

SEQ ID NO: 28338 - DNA, 20 bp, Artificial Sequence
  Description of Artificial Sequence: Synthetic oligonucleotide
  Target: PCSK9; (+) strand; PAM type: YTN; PAM sequence: CTC
agtgtgtttgacaaaggcca

SEQ ID NO: 28339 - DNA, 20 bp, Artificial Sequence
  Description of Artificial Sequence: Synthetic oligonucleotide
  Target: PCSK9; (+) strand; PAM type: YTN; PAM sequence: TTT
gacaaaggccactgccaacc

SEQ ID NO: 28340 - DNA, 20 bp, Artificial Sequence
  Description of Artificial Sequence: Synthetic oligonucleotide
  Target: PCSK9; (+) strand; PAM type: YTN; PAM sequence: TTG
acaaaggccactgccaacct

SEQ ID NO: 28341 - DNA, 20 bp, Artificial Sequence
  Description of Artificial Sequence: Synthetic oligonucleotide
  Target: PCSK9; (+) strand; PAM type: YTN; PAM sequence: CTG
ccaacctccagcaagtcaca

SEQ ID NO: 28342 - DNA, 20 bp, Artificial Sequence
  Description of Artificial Sequence: Synthetic oligonucleotide
  Target: PCSK9; (+) strand; PAM type: YTN; PAM sequence: CTC
cagcaagtcacagaataaca

SEQ ID NO: 28343 - DNA, 20 bp, Artificial Sequence
  Description of Artificial Sequence: Synthetic oligonucleotide
  Target: PCSK9; (+) strand; PAM type: YTN; PAM sequence: CTG
acagcacagaaaccctcact

SEQ ID NO: 28344 - DNA, 20 bp, Artificial Sequence
  Description of Artificial Sequence: Synthetic oligonucleotide
  Target: PCSK9; (+) strand; PAM type: YTN; PAM sequence: CTC
actgccagagaatgaaaaga

SEQ ID NO: 28345 - DNA, 20 bp, Artificial Sequence
  Description of Artificial Sequence: Synthetic oligonucleotide
  Target: PCSK9; (+) strand; PAM type: YTN; PAM sequence: CTG
ccagagaatgaaaagactgg

SEQ ID NO: 28346 - DNA, 20 bp, Artificial Sequence
  Description of Artificial Sequence: Synthetic oligonucleotide
  Target: PCSK9; (+) strand; PAM type: YTN; PAM sequence: CTG
ggccatggcgagagcacagt

SEQ ID NO: 28347 - DNA, 20 bp, Artificial Sequence
  Description of Artificial Sequence: Synthetic oligonucleotide
  Target: PCSK9; (+) strand; PAM type: YTN; PAM sequence: CTG
cctggccacatgcccacaca

SEQ ID NO: 28348 - DNA, 20 bp, Artificial Sequence
  Description of Artificial Sequence: Synthetic oligonucleotide
  Target: PCSK9; (+) strand; PAM type: YTN; PAM sequence: CTG
gccacatgcccacacaatgc

SEQ ID NO: 28349 - DNA, 20 bp, Artificial Sequence
  Description of Artificial Sequence: Synthetic oligonucleotide
  Target: PCSK9; (+) strand; PAM type: YTN; PAM sequence: CTT
cagggctggctgcgcctctg

SEQ ID NO: 28350 - DNA, 20 bp, Artificial Sequence
  Description of Artificial Sequence: Synthetic oligonucleotide
  Target: PCSK9; (+) strand; PAM type: YTN; PAM sequence: TTC
agggctggctgcgcctctgt

SEQ ID NO: 28351 - DNA, 20 bp, Artificial Sequence
  Description of Artificial Sequence: Synthetic oligonucleotide
  Target: PCSK9; (+) strand; PAM type: YTN; PAM sequence: CTG
gctgcgcctctgtgacttgg

SEQ ID NO: 28352 - DNA, 20 bp, Artificial Sequence
  Description of Artificial Sequence: Synthetic oligonucleotide
  Target: PCSK9; (+) strand; PAM type: YTN; PAM sequence: CTG
cgcctctgtgacttggcaaa

SEQ ID NO: 28353 - DNA, 20 bp, Artificial Sequence
  Description of Artificial Sequence: Synthetic oligonucleotide
  Target: PCSK9; (+) strand; PAM type: YTN; PAM sequence: CTC
tgtgacttggcaaatctgac

SEQ ID NO: 28354 - DNA, 20 bp, Artificial Sequence
  Description of Artificial Sequence: Synthetic oligonucleotide
  Target: PCSK9; (+) strand; PAM type: YTN; PAM sequence: CTG
tgacttggcaaatctgacag

SEQ ID NO: 28355 - DNA, 20 bp, Artificial Sequence
  Description of Artificial Sequence: Synthetic oligonucleotide
  Target: PCSK9; (+) strand; PAM type: YTN; PAM sequence: CTT
ggcaaatctgacagtgaaaa

SEQ ID NO: 28356 - DNA, 20 bp, Artificial Sequence
  Description of Artificial Sequence: Synthetic oligonucleotide
  Target: PCSK9; (+) strand; PAM type: YTN; PAM sequence: TTG
gcaaatctgacagtgaaaac

SEQ ID NO: 28357 - DNA, 20 bp, Artificial Sequence
  Description of Artificial Sequence: Synthetic oligonucleotide
  Target: PCSK9; (+) strand; PAM type: YTN; PAM sequence: CTG
acagtgaaaacctggcactt

SEQ ID NO: 28358 - DNA, 20 bp, Artificial Sequence
  Description of Artificial Sequence: Synthetic oligonucleotide
  Target: PCSK9; (+) strand; PAM type: YTN; PAM sequence: CTG
gcacttcctaaggctcccta

SEQ ID NO: 28359 - DNA, 20 bp, Artificial Sequence
  Description of Artificial Sequence: Synthetic oligonucleotide
  Target: PCSK9; (+) strand; PAM type: YTN; PAM sequence: CTT
cctaaggctccctagttctg

SEQ ID NO: 28360 - DNA, 20 bp, Artificial Sequence
  Description of Artificial Sequence: Synthetic oligonucleotide
  Target: PCSK9; (+) strand; PAM type: YTN; PAM sequence: TTC
ctaaggctccctagttctgt

SEQ ID NO: 28361 - DNA, 20 bp, Artificial Sequence
  Description of Artificial Sequence: Synthetic oligonucleotide
  Target: PCSK9; (+) strand; PAM type: YTN; PAM sequence: CTA
aggctccctagttctgtgca

SEQ ID NO: 28362 - DNA, 20 bp, Artificial Sequence
  Description of Artificial Sequence: Synthetic oligonucleotide
  Target: PCSK9; (+) strand; PAM type: YTN; PAM sequence: CTC
cctagttctgtgcatggtga

SEQ ID NO: 28363 - DNA, 20 bp, Artificial Sequence
  Description of Artificial Sequence: Synthetic oligonucleotide
  Target: PCSK9; (+) strand; PAM type: YTN; PAM sequence: CTA
gttctgtgcatggtgagatg

SEQ ID NO: 28364 - DNA, 20 bp, Artificial Sequence
  Description of Artificial Sequence: Synthetic oligonucleotide
  Target: PCSK9; (+) strand; PAM type: YTN; PAM sequence: TTC
tgtgcatggtgagatgaaaa

SEQ ID NO: 28365 - DNA, 20 bp, Artificial Sequence
  Description of Artificial Sequence: Synthetic oligonucleotide
  Target: PCSK9; (+) strand; PAM type: YTN; PAM sequence: CTG
tgcatggtgagatgaaaata

SEQ ID NO: 28366 - DNA, 20 bp, Artificial Sequence
  Description of Artificial Sequence: Synthetic oligonucleotide
  Target: PCSK9; (+) strand; PAM type: YTN; PAM sequence: CTG
taactaaaggcaaaacaggg

SEQ ID NO: 28367 - DNA, 20 bp, Artificial Sequence
  Description of Artificial Sequence: Synthetic oligonucleotide
  Target: PCSK9; (+) strand; PAM type: YTN; PAM sequence: CTA
aaggcaaaacagggccgaaa

SEQ ID NO: 28368 - DNA, 20 bp, Artificial Sequence
  Description of Artificial Sequence: Synthetic oligonucleotide
  Target: PCSK9; (+) strand; PAM type: YTN; PAM sequence: TTC
aaaatacaaaatgtacaaaa

SEQ ID NO: 28369 - DNA, 20 bp, Artificial Sequence
  Description of Artificial Sequence: Synthetic oligonucleotide
  Target: PCSK9; (+) strand; PAM type: YTN; PAM sequence: CTC
tcccccacaccataaaaggg

SEQ ID NO: 28370 - DNA, 20 bp, Artificial Sequence
  Description of Artificial Sequence: Synthetic oligonucleotide
  Target: PCSK9; (+) strand; PAM type: YTN; PAM sequence: CTC
ccccacaccataaaagggag

SEQ ID NO: 28371 - DNA, 20 bp, Artificial Sequence
  Description of Artificial Sequence: Synthetic oligonucleotide
  Target: PCSK9; (+) strand; PAM type: YTN; PAM sequence: CTG
gtataaatgagtgaatggtg

SEQ ID NO: 28372 - DNA, 20 bp, Artificial Sequence
  Description of Artificial Sequence: Synthetic oligonucleotide
  Target: PCSK9; (+) strand; PAM type: YTN; PAM sequence: CTA
tactttggaaatacgactaa

SEQ ID NO: 28373 - DNA, 20 bp, Artificial Sequence
  Description of Artificial Sequence: Synthetic oligonucleotide
  Target: PCSK9; (+) strand; PAM type: YTN; PAM sequence: CTT
tggaaatacgactaaatgga

SEQ ID NO: 28374 - DNA, 20 bp, Artificial Sequence
  Description of Artificial Sequence: Synthetic oligonucleotide
  Target: PCSK9; (+) strand; PAM type: YTN; PAM sequence: TTT
ggaaatacgactaaatggat

SEQ ID NO: 28375 - DNA, 20 bp, Artificial Sequence
  Description of Artificial Sequence: Synthetic oligonucleotide
  Target: PCSK9; (+) strand; PAM type: YTN; PAM sequence: TTG
gaaatacgactaaatggatg

SEQ ID NO: 28376 - DNA, 20 bp, Artificial Sequence
  Description of Artificial Sequence: Synthetic oligonucleotide
  Target: PCSK9; (+) strand; PAM type: YTN; PAM sequence: CTA
aatggatggttattcaattg

SEQ ID NO: 28377 - DNA, 20 bp, Artificial Sequence
  Description of Artificial Sequence: Synthetic oligonucleotide
  Target: PCSK9; (+) strand; PAM type: YTN; PAM sequence: TTA
ttcaattgctttatatttat

SEQ ID NO: 28378 - DNA, 20 bp, Artificial Sequence
  Description of Artificial Sequence: Synthetic oligonucleotide
  Target: PCSK9; (+) strand; PAM type: YTN; PAM sequence: TTC
aattgctttatatttatttc

SEQ ID NO: 28379 - DNA, 20 bp, Artificial Sequence
  Description of Artificial Sequence: Synthetic oligonucleotide
  Target: PCSK9; (+) strand; PAM type: YTN; PAM sequence: TTG
ctttatatttatttctggga

SEQ ID NO: 28380 - DNA, 20 bp, Artificial Sequence
  Description of Artificial Sequence: Synthetic oligonucleotide
  Target: PCSK9; (+) strand; PAM type: YTN; PAM sequence: CTT
tatatttatttctgggaaaa

SEQ ID NO: 28381 - DNA, 20 bp, Artificial Sequence
  Description of Artificial Sequence: Synthetic oligonucleotide
  Target: PCSK9; (+) strand; PAM type: YTN; PAM sequence: TTT
atatttatttctgggaaaat

SEQ ID NO: 28382 - DNA, 20 bp, Artificial Sequence
  Description of Artificial Sequence: Synthetic oligonucleotide
  Target: PCSK9; (+) strand; PAM type: YTN; PAM sequence: TTA
tatttatttctgggaaaata

SEQ ID NO: 28383 - DNA, 20 bp, Artificial Sequence
  Description of Artificial Sequence: Synthetic oligonucleotide
  Target: PCSK9; (+) strand; PAM type: YTN; PAM sequence: TTT
atttctgggaaaataaatct

SEQ ID NO: 28384 - DNA, 20 bp, Artificial Sequence
  Description of Artificial Sequence: Synthetic oligonucleotide
  Target: PCSK9; (+) strand; PAM type: YTN; PAM sequence: TTA
tttctgggaaaataaatctt

SEQ ID NO: 28385 - DNA, 20 bp, Artificial Sequence
  Description of Artificial Sequence: Synthetic oligonucleotide
  Target: PCSK9; (+) strand; PAM type: YTN; PAM sequence: TTT
ctgggaaaataaatcttaaa

SEQ ID NO: 28386 - DNA, 20 bp, Artificial Sequence
  Description of Artificial Sequence: Synthetic oligonucleotide
  Target: PCSK9; (+) strand; PAM type: YTN; PAM sequence: TTC
tgggaaaataaatcttaaac

SEQ ID NO: 28387 - DNA, 20 bp, Artificial Sequence
  Description of Artificial Sequence: Synthetic oligonucleotide
  Target: PCSK9; (+) strand; PAM type: YTN; PAM sequence: CTG
ggaaaataaatcttaaacct

SEQ ID NO: 28388 - DNA, 20 bp, Artificial Sequence
  Description of Artificial Sequence: Synthetic oligonucleotide
  Target: PCSK9; (+) strand; PAM type: YTN; PAM sequence: CTT
aaaccttgactgacttttca

SEQ ID NO: 28389 - DNA, 20 bp, Artificial Sequence
  Description of Artificial Sequence: Synthetic oligonucleotide
  Target: PCSK9; (+) strand; PAM type: YTN; PAM sequence: TTA
aaccttgactgacttttcag

SEQ ID NO: 28390 - DNA, 20 bp, Artificial Sequence
  Description of Artificial Sequence: Synthetic oligonucleotide
  Target: PCSK9; (+) strand; PAM type: YTN; PAM sequence: CTT
gactgacttttcagtgttaa

SEQ ID NO: 28391 - DNA, 20 bp, Artificial Sequence
  Description of Artificial Sequence: Synthetic oligonucleotide
  Target: PCSK9; (+) strand; PAM type: YTN; PAM sequence: TTG
actgacttttcagtgttaat

SEQ ID NO: 28392 - DNA, 20 bp, Artificial Sequence
  Description of Artificial Sequence: Synthetic oligonucleotide
  Target: PCSK9; (+) strand; PAM type: YTN; PAM sequence: CTG
acttttcagtgttaattagt

SEQ ID NO: 28393 - DNA, 20 bp, Artificial Sequence
  Description of Artificial Sequence: Synthetic oligonucleotide
  Target: PCSK9; (+) strand; PAM type: YTN; PAM sequence: CTT
ttcagtgttaattagtcatg

SEQ ID NO: 28394 - DNA, 20 bp, Artificial Sequence
  Description of Artificial Sequence: Synthetic oligonucleotide
  Target: PCSK9; (+) strand; PAM type: YTN; PAM sequence: TTT
tcagtgttaattagtcatgt

SEQ ID NO: 28395 - DNA, 20 bp, Artificial Sequence
  Description of Artificial Sequence: Synthetic oligonucleotide
  Target: PCSK9; (+) strand; PAM type: YTN; PAM sequence: TTT
cagtgttaattagtcatgtt

SEQ ID NO: 28396 - DNA, 20 bp, Artificial Sequence
  Description of Artificial Sequence: Synthetic oligonucleotide
  Target: PCSK9; (+) strand; PAM type: YTN; PAM sequence: TTC
agtgttaattagtcatgttg

SEQ ID NO: 28397 - DNA, 20 bp, Artificial Sequence
  Description of Artificial Sequence: Synthetic oligonucleotide
  Target: PCSK9; (+) strand; PAM type: YTN; PAM sequence: TTA
attagtcatgttgaggagaa

SEQ ID NO: 28398 - DNA, 20 bp, Artificial Sequence
  Description of Artificial Sequence: Synthetic oligonucleotide
  Target: PCSK9; (+) strand; PAM type: YTN; PAM sequence: TTA
gtcatgttgaggagaaacaa

SEQ ID NO: 28399 - DNA, 20 bp, Artificial Sequence
  Description of Artificial Sequence: Synthetic oligonucleotide
  Target: PCSK9; (+) strand; PAM type: YTN; PAM sequence: TTG
aggagaaacaaattctcaaa

SEQ ID NO: 28400 - DNA, 20 bp, Artificial Sequence
  Description of Artificial Sequence: Synthetic oligonucleotide
  Target: PCSK9; (+) strand; PAM type: YTN; PAM sequence: TTC
tcaaattccttctctgcatt

SEQ ID NO: 28401 - DNA, 20 bp, Artificial Sequence
  Description of Artificial Sequence: Synthetic oligonucleotide
  Target: PCSK9; (+) strand; PAM type: YTN; PAM sequence: CTC
aaattccttctctgcattac

SEQ ID NO: 28402 - DNA, 20 bp, Artificial Sequence
  Description of Artificial Sequence: Synthetic oligonucleotide
  Target: PCSK9; (+) strand; PAM type: YTN; PAM sequence: TTC
cttctctgcattacaataac

SEQ ID NO: 28403 - DNA, 20 bp, Artificial Sequence
  Description of Artificial Sequence: Synthetic oligonucleotide
  Target: PCSK9; (+) strand; PAM type: YTN; PAM sequence: CTT
ctctgcattacaataactat

SEQ ID NO: 28404 - DNA, 20 bp, Artificial Sequence
  Description of Artificial Sequence: Synthetic oligonucleotide
  Target: PCSK9; (+) strand; PAM type: YTN; PAM sequence: TTC
tctgcattacaataactatg

SEQ ID NO: 28405 - DNA, 20 bp, Artificial Sequence
  Description of Artificial Sequence: Synthetic oligonucleotide
  Target: PCSK9; (+) strand; PAM type: YTN; PAM sequence: CTC
tgcattacaataactatgaa

SEQ ID NO: 28406 - DNA, 20 bp, Artificial Sequence
  Description of Artificial Sequence: Synthetic oligonucleotide
  Target: PCSK9; (+) strand; PAM type: YTN; PAM sequence: CTG
cattacaataactatgaaac

SEQ ID NO: 28407 - DNA, 20 bp, Artificial Sequence
  Description of Artificial Sequence: Synthetic oligonucleotide
  Target: PCSK9; (+) strand; PAM type: YTN; PAM sequence: TTA
caataactatgaaactcaca

SEQ ID NO: 28408 - DNA, 20 bp, Artificial Sequence
  Description of Artificial Sequence: Synthetic oligonucleotide
  Target: PCSK9; (+) strand; PAM type: YTN; PAM sequence: CTA
tgaaactcacaagcagtgtg

SEQ ID NO: 28409 - DNA, 20 bp, Artificial Sequence
  Description of Artificial Sequence: Synthetic oligonucleotide
  Target: PCSK9; (+) strand; PAM type: YTN; PAM sequence: CTC
acaagcagtgtgtaccaact

SEQ ID NO: 28410 - DNA, 20 bp, Artificial Sequence
  Description of Artificial Sequence: Synthetic oligonucleotide
  Target: PCSK9; (+) strand; PAM type: YTN; PAM sequence: CTC
aaatagttaacttcatatac

SEQ ID NO: 28411 - DNA, 20 bp, Artificial Sequence
  Description of Artificial Sequence: Synthetic oligonucleotide
  Target: PCSK9; (+) strand; PAM type: YTN; PAM sequence: TTA
acttcatatacaaccaatac

SEQ ID NO: 28412 - DNA, 20 bp, Artificial Sequence
  Description of Artificial Sequence: Synthetic oligonucleotide
  Target: PCSK9; (+) strand; PAM type: YTN; PAM sequence: CTT
catatacaaccaataccaag

SEQ ID NO: 28413 - DNA, 20 bp, Artificial Sequence
  Description of Artificial Sequence: Synthetic oligonucleotide
  Target: PCSK9; (+) strand; PAM type: YTN; PAM sequence: TTC
atatacaaccaataccaagg

SEQ ID NO: 28414 - DNA, 20 bp, Artificial Sequence
  Description of Artificial Sequence: Synthetic oligonucleotide
  Target: PCSK9; (+) strand; PAM type: YTN; PAM sequence: TTT
cagtaattatgttttaagca

SEQ ID NO: 28415 - DNA, 20 bp, Artificial Sequence
  Description of Artificial Sequence: Synthetic oligonucleotide
  Target: PCSK9; (+) strand; PAM type: YTN; PAM sequence: TTC
agtaattatgttttaagcaa

SEQ ID NO: 28416 - DNA, 20 bp, Artificial Sequence
  Description of Artificial Sequence: Synthetic oligonucleotide
  Target: PCSK9; (+) strand; PAM type: YTN; PAM sequence: TTA
tgttttaagcaaaagcaaac

SEQ ID NO: 28417 - DNA, 20 bp, Artificial Sequence
  Description of Artificial Sequence: Synthetic oligonucleotide
  Target: PCSK9; (+) strand; PAM type: YTN; PAM sequence: TTT
taagcaaaagcaaacgattg

SEQ ID NO: 28418 - DNA, 20 bp, Artificial Sequence
  Description of Artificial Sequence: Synthetic oligonucleotide
  Target: PCSK9; (+) strand; PAM type: YTN; PAM sequence: TTT
aagcaaaagcaaacgattgc

SEQ ID NO: 28419 - DNA, 20 bp, Artificial Sequence
  Description of Artificial Sequence: Synthetic oligonucleotide
  Target: PCSK9; (+) strand; PAM type: YTN; PAM sequence: TTA
agcaaaagcaaacgattgca

SEQ ID NO: 28420 - DNA, 20 bp, Artificial Sequence
  Description of Artificial Sequence: Synthetic oligonucleotide
  Target: PCSK9; (+) strand; PAM type: YTN; PAM sequence: TTG
cagatcacatgatttaagac

SEQ ID NO: 28421 - DNA, 20 bp, Artificial Sequence
  Description of Artificial Sequence: Synthetic oligonucleotide
  Target: PCSK9; (+) strand; PAM type: YTN; PAM sequence: TTT
aagactacagtttattcaat

SEQ ID NO: 28422 - DNA, 20 bp, Artificial Sequence
  Description of Artificial Sequence: Synthetic oligonucleotide
  Target: PCSK9; (+) strand; PAM type: YTN; PAM sequence: TTA
agactacagtttattcaata

SEQ ID NO: 28423 - DNA, 20 bp, Artificial Sequence
  Description of Artificial Sequence: Synthetic oligonucleotide
  Target: PCSK9; (+) strand; PAM type: YTN; PAM sequence: CTA
cagtttattcaatatgtctc

SEQ ID NO: 28424 - DNA, 20 bp, Artificial Sequence
  Description of Artificial Sequence: Synthetic oligonucleotide
  Target: PCSK9; (+) strand; PAM type: YTN; PAM sequence: TTT
attcaatatgtctccaagca

SEQ ID NO: 28425 - DNA, 20 bp, Artificial Sequence
  Description of Artificial Sequence: Synthetic oligonucleotide
  Target: PCSK9; (+) strand; PAM type: YTN; PAM sequence: TTA
ttcaatatgtctccaagcat

SEQ ID NO: 28426 - DNA, 20 bp, Artificial Sequence
  Description of Artificial Sequence: Synthetic oligonucleotide
  Target: PCSK9; (+) strand; PAM type: YTN; PAM sequence: TTC
aatatgtctccaagcattaa

SEQ ID NO: 28427 - DNA, 20 bp, Artificial Sequence
  Description of Artificial Sequence: Synthetic oligonucleotide
  Target: PCSK9; (+) strand; PAM type: YTN; PAM sequence: CTC
caagcattaaaaagataatt

SEQ ID NO: 28428 - DNA, 20 bp, Artificial Sequence
  Description of Artificial Sequence: Synthetic oligonucleotide
  Target: PCSK9; (+) strand; PAM type: YTN; PAM sequence: TTA
aaaagataattctgtgaagt

SEQ ID NO: 28429 - DNA, 20 bp, Artificial Sequence
  Description of Artificial Sequence: Synthetic oligonucleotide
  Target: PCSK9; (+) strand; PAM type: YTN; PAM sequence: TTC
tgtgaagttaaactcagtaa

SEQ ID NO: 28430 - DNA, 20 bp, Artificial Sequence
  Description of Artificial Sequence: Synthetic oligonucleotide
  Target: PCSK9; (+) strand; PAM type: YTN; PAM sequence: CTG
tgaagttaaactcagtaaaa

SEQ ID NO: 28431 - DNA, 20 bp, Artificial Sequence
  Description of Artificial Sequence: Synthetic oligonucleotide
  Target: PCSK9; (+) strand; PAM type: YTN; PAM sequence: TTA
aactcagtaaaattatatct

SEQ ID NO: 28432 - DNA, 20 bp, Artificial Sequence
  Description of Artificial Sequence: Synthetic oligonucleotide
  Target: PCSK9; (+) strand; PAM type: YTN; PAM sequence: CTC
agtaaaattatatcttaaag

SEQ ID NO: 28433 - DNA, 20 bp, Artificial Sequence
  Description of Artificial Sequence: Synthetic oligonucleotide
  Target: PCSK9; (+) strand; PAM type: YTN; PAM sequence: TTA
tatcttaaagtgcttttatt

SEQ ID NO: 28434 - DNA, 20 bp, Artificial Sequence
  Description of Artificial Sequence: Synthetic oligonucleotide
  Target: PCSK9; (+) strand; PAM type: YTN; PAM sequence: CTT
aaagtgcttttattttgctg

SEQ ID NO: 28435 - DNA, 20 bp, Artificial Sequence
  Description of Artificial Sequence: Synthetic oligonucleotide
  Target: PCSK9; (+) strand; PAM type: YTN; PAM sequence: TTA
aagtgcttttattttgctgt

SEQ ID NO: 28436 - DNA, 20 bp, Artificial Sequence
  Description of Artificial Sequence: Synthetic oligonucleotide
  Target: PCSK9; (+) strand; PAM type: YTN; PAM sequence: CTT
ttattttgctgtttttaaaa

SEQ ID NO: 28437 - DNA, 20 bp, Artificial Sequence
  Description of Artificial Sequence: Synthetic oligonucleotide
  Target: PCSK9; (+) strand; PAM type: YTN; PAM sequence: TTT
tattttgctgtttttaaaat

SEQ ID NO: 28438 - DNA, 20 bp, Artificial Sequence
  Description of Artificial Sequence: Synthetic oligonucleotide
  Target: PCSK9; (+) strand; PAM type: YTN; PAM sequence: TTT
attttgctgtttttaaaatc

SEQ ID NO: 28439 - DNA, 20 bp, Artificial Sequence
  Description of Artificial Sequence: Synthetic oligonucleotide
  Target: PCSK9; (+) strand; PAM type: YTN; PAM sequence: TTA
ttttgctgtttttaaaatct

SEQ ID NO: 28440 - DNA, 20 bp, Artificial Sequence
  Description of Artificial Sequence: Synthetic oligonucleotide
  Target: PCSK9; (+) strand; PAM type: YTN; PAM sequence: TTT
tgctgtttttaaaatctgtt

SEQ ID NO: 28441 - DNA, 20 bp, Artificial Sequence
  Description of Artificial Sequence: Synthetic oligonucleotide
  Target: PCSK9; (+) strand; PAM type: YTN; PAM sequence: TTT
gctgtttttaaaatctgttt

SEQ ID NO: 28442 - DNA, 20 bp, Artificial Sequence
  Description of Artificial Sequence: Synthetic oligonucleotide
  Target: PCSK9; (+) strand; PAM type: YTN; PAM sequence: TTG
ctgtttttaaaatctgtttg

SEQ ID NO: 28443 - DNA, 20 bp, Artificial Sequence
  Description of Artificial Sequence: Synthetic oligonucleotide
  Target: PCSK9; (+) strand; PAM type: YTN; PAM sequence: CTG
tttttaaaatctgtttgggg

SEQ ID NO: 28444 - DNA, 20 bp, Artificial Sequence
  Description of Artificial Sequence: Synthetic oligonucleotide
  Target: PCSK9; (+) strand; PAM type: YTN; PAM sequence: TTT
ttaaaatctgtttggggaac

SEQ ID NO: 28445 - DNA, 20 bp, Artificial Sequence
  Description of Artificial Sequence: Synthetic oligonucleotide
  Target: PCSK9; (+) strand; PAM type: YTN; PAM sequence: TTT
taaaatctgtttggggaaca

SEQ ID NO: 28446 - DNA, 20 bp, Artificial Sequence
  Description of Artificial Sequence: Synthetic oligonucleotide
  Target: PCSK9; (+) strand; PAM type: YTN; PAM sequence: TTT
aaaatctgtttggggaacaa

SEQ ID NO: 28447 - DNA, 20 bp, Artificial Sequence
  Description of Artificial Sequence: Synthetic oligonucleotide
  Target: PCSK9; (+) strand; PAM type: YTN; PAM sequence: TTA
aaatctgtttggggaacaac

SEQ ID NO: 28448 - DNA, 20 bp, Artificial Sequence
  Description of Artificial Sequence: Synthetic oligonucleotide
  Target: PCSK9; (+) strand; PAM type: YTN; PAM sequence: CTG
tttggggaacaactcataac

SEQ ID NO: 28449 - DNA, 20 bp, Artificial Sequence
  Description of Artificial Sequence: Synthetic oligonucleotide
  Target: PCSK9; (+) strand; PAM type: YTN; PAM sequence: TTT
ggggaacaactcataacttc

SEQ ID NO: 28450 - DNA, 20 bp, Artificial Sequence
  Description of Artificial Sequence: Synthetic oligonucleotide
  Target: PCSK9; (+) strand; PAM type: YTN; PAM sequence: TTG
gggaacaactcataacttct

SEQ ID NO: 28451 - DNA, 20 bp, Artificial Sequence
  Description of Artificial Sequence: Synthetic oligonucleotide
  Target: PCSK9; (+) strand; PAM type: YTN; PAM sequence: CTC
ataacttctttaagtaattg

SEQ ID NO: 28452 - DNA, 20 bp, Artificial Sequence
  Description of Artificial Sequence: Synthetic oligonucleotide
  Target: PCSK9; (+) strand; PAM type: YTN; PAM sequence: CTT
ctttaagtaattgatgtcaa

SEQ ID NO: 28453 - DNA, 20 bp, Artificial Sequence
  Description of Artificial Sequence: Synthetic oligonucleotide
  Target: PCSK9; (+) strand; PAM type: YTN; PAM sequence: TTC
tttaagtaattgatgtcaaa

SEQ ID NO: 28454 - DNA, 20 bp, Artificial Sequence
  Description of Artificial Sequence: Synthetic oligonucleotide
  Target: PCSK9; (+) strand; PAM type: YTN; PAM sequence: CTT
taagtaattgatgtcaaata

SEQ ID NO: 28455 - DNA, 20 bp, Artificial Sequence
  Description of Artificial Sequence: Synthetic oligonucleotide
  Target: PCSK9; (+) strand; PAM type: YTN; PAM sequence: TTT
aagtaattgatgtcaaataa

SEQ ID NO: 28456 - DNA, 20 bp, Artificial Sequence
  Description of Artificial Sequence: Synthetic oligonucleotide
  Target: PCSK9; (+) strand; PAM type: YTN; PAM sequence: TTA
agtaattgatgtcaaataat

SEQ ID NO: 28457 - DNA, 20 bp, Artificial Sequence
  Description of Artificial Sequence: Synthetic oligonucleotide
  Target: PCSK9; (+) strand; PAM type: YTN; PAM sequence: TTG
atgtcaaataatgcaccctg

SEQ ID NO: 28458 - DNA, 20 bp, Artificial Sequence
  Description of Artificial Sequence: Synthetic oligonucleotide
  Target: PCSK9; (+) strand; PAM type: YTN; PAM sequence: CTG
tacttctggagaacacagca

SEQ ID NO: 28459 - DNA, 20 bp, Artificial Sequence
  Description of Artificial Sequence: Synthetic oligonucleotide
  Target: PCSK9; (+) strand; PAM type: YTN; PAM sequence: CTT
ctggagaacacagcattttc

SEQ ID NO: 28460 - DNA, 20 bp, Artificial Sequence
  Description of Artificial Sequence: Synthetic oligonucleotide
  Target: PCSK9; (+) strand; PAM type: YTN; PAM sequence: TTC
tggagaacacagcattttca

SEQ ID NO: 28461 - DNA, 20 bp, Artificial Sequence
  Description of Artificial Sequence: Synthetic oligonucleotide
  Target: PCSK9; (+) strand; PAM type: YTN; PAM sequence: CTG
gagaacacagcattttcaaa

SEQ ID NO: 28462 - DNA, 20 bp, Artificial Sequence
  Description of Artificial Sequence: Synthetic oligonucleotide
  Target: PCSK9; (+) strand; PAM type: YTN; PAM sequence: TTT
tcaaaattgctcttttcaat

SEQ ID NO: 28463 - DNA, 20 bp, Artificial Sequence
  Description of Artificial Sequence: Synthetic oligonucleotide
  Target: PCSK9; (+) strand; PAM type: YTN; PAM sequence: TTT
caaaattgctcttttcaatc

SEQ ID NO: 28464 - DNA, 20 bp, Artificial Sequence
  Description of Artificial Sequence: Synthetic oligonucleotide
  Target: PCSK9; (+) strand; PAM type: YTN; PAM sequence: TTC
aaaattgctcttttcaatct

SEQ ID NO: 28465 - DNA, 20 bp, Artificial Sequence
  Description of Artificial Sequence: Synthetic oligonucleotide
  Target: PCSK9; (+) strand; PAM type: YTN; PAM sequence: TTG
ctcttttcaatctaattata

SEQ ID NO: 28466 - DNA, 20 bp, Artificial Sequence
  Description of Artificial Sequence: Synthetic oligonucleotide
  Target: PCSK9; (+) strand; PAM type: YTN; PAM sequence: CTC
ttttcaatctaattatatca

SEQ ID NO: 28467 - DNA, 20 bp, Artificial Sequence
  Description of Artificial Sequence: Synthetic oligonucleotide
  Target: PCSK9; (+) strand; PAM type: YTN; PAM sequence: CTT
ttcaatctaattatatcaga

SEQ ID NO: 28468 - DNA, 20 bp, Artificial Sequence
  Description of Artificial Sequence: Synthetic oligonucleotide
  Target: PCSK9; (+) strand; PAM type: YTN; PAM sequence: TTT
tcaatctaattatatcagaa

SEQ ID NO: 28469 - DNA, 20 bp, Artificial Sequence
  Description of Artificial Sequence: Synthetic oligonucleotide
  Target: PCSK9; (+) strand; PAM type: YTN; PAM sequence: TTT
caatctaattatatcagaaa

SEQ ID NO: 28470 - DNA, 20 bp, Artificial Sequence
  Description of Artificial Sequence: Synthetic oligonucleotide
  Target: PCSK9; (+) strand; PAM type: YTN; PAM sequence: TTC
aatctaattatatcagaaaa

SEQ ID NO: 28471 - DNA, 20 bp, Artificial Sequence
  Description of Artificial Sequence: Synthetic oligonucleotide
  Target: PCSK9; (+) strand; PAM type: YTN; PAM sequence: CTA
attatatcagaaaaatatct

SEQ ID NO: 28472 - DNA, 20 bp, Artificial Sequence
  Description of Artificial Sequence: Synthetic oligonucleotide
  Target: PCSK9; (+) strand; PAM type: YTN; PAM sequence: TTA
tatcagaaaaatatcttcaa

SEQ ID NO: 28473 - DNA, 20 bp, Artificial Sequence
  Description of Artificial Sequence: Synthetic oligonucleotide
  Target: PCSK9; (+) strand; PAM type: YTN; PAM sequence: CTT
caagagcttagtatttccca

SEQ ID NO: 28474 - DNA, 20 bp, Artificial Sequence
  Description of Artificial Sequence: Synthetic oligonucleotide
  Target: PCSK9; (+) strand; PAM type: YTN; PAM sequence: TTC
aagagcttagtatttcccaa

SEQ ID NO: 28475 - DNA, 20 bp, Artificial Sequence
  Description of Artificial Sequence: Synthetic oligonucleotide
  Target: PCSK9; (+) strand; PAM type: YTN; PAM sequence: CTT
agtatttcccaatttttgat

SEQ ID NO: 28476 - DNA, 20 bp, Artificial Sequence
  Description of Artificial Sequence: Synthetic oligonucleotide
  Target: PCSK9; (+) strand; PAM type: YTN; PAM sequence: TTA
gtatttcccaatttttgatc

SEQ ID NO: 28477 - DNA, 20 bp, Artificial Sequence
  Description of Artificial Sequence: Synthetic oligonucleotide
  Target: PCSK9; (+) strand; PAM type: YTN; PAM sequence: TTT
cccaatttttgatcctgatc

SEQ ID NO: 28478 - DNA, 20 bp, Artificial Sequence
  Description of Artificial Sequence: Synthetic oligonucleotide
  Target: PCSK9; (+) strand; PAM type: YTN; PAM sequence: TTC
ccaatttttgatcctgatcc

SEQ ID NO: 28479 - DNA, 20 bp, Artificial Sequence
  Description of Artificial Sequence: Synthetic oligonucleotide
  Target: PCSK9; (+) strand; PAM type: YTN; PAM sequence: TTT
ttgatcctgatcctggtaac

SEQ ID NO: 28480 - DNA, 20 bp, Artificial Sequence
  Description of Artificial Sequence: Synthetic oligonucleotide
  Target: PCSK9; (+) strand; PAM type: YTN; PAM sequence: TTT
tgatcctgatcctggtaacc

SEQ ID NO: 28481 - DNA, 20 bp, Artificial Sequence
  Description of Artificial Sequence: Synthetic oligonucleotide
  Target: PCSK9; (+) strand; PAM type: YTN; PAM sequence: TTT
gatcctgatcctggtaacct

SEQ ID NO: 28482 - DNA, 20 bp, Artificial Sequence
  Description of Artificial Sequence: Synthetic oligonucleotide
  Target: PCSK9; (+) strand; PAM type: YTN; PAM sequence: TTG
atcctgatcctggtaacctt

SEQ ID NO: 28483 - DNA, 20 bp, Artificial Sequence
  Description of Artificial Sequence: Synthetic oligonucleotide
  Target: PCSK9; (+) strand; PAM type: YTN; PAM sequence: CTG
atcctggtaacctttcatca

SEQ ID NO: 28484 - DNA, 20 bp, Artificial Sequence
  Description of Artificial Sequence: Synthetic oligonucleotide
  Target: PCSK9; (+) strand; PAM type: YTN; PAM sequence: CTG
gtaacctttcatcaagatcc

SEQ ID NO: 28485 - DNA, 20 bp, Artificial Sequence
  Description of Artificial Sequence: Synthetic oligonucleotide
  Target: PCSK9; (+) strand; PAM type: YTN; PAM sequence: CTT
tcatcaagatccaagcttat

SEQ ID NO: 28486 - DNA, 20 bp, Artificial Sequence
  Description of Artificial Sequence: Synthetic oligonucleotide
  Target: PCSK9; (+) strand; PAM type: YTN; PAM sequence: TTT
catcaagatccaagcttatg

SEQ ID NO: 28487 - DNA, 20 bp, Artificial Sequence
  Description of Artificial Sequence: Synthetic oligonucleotide
  Target: PCSK9; (+) strand; PAM type: YTN; PAM sequence: TTC
atcaagatccaagcttatgc

SEQ ID NO: 28488 - DNA, 20 bp, Artificial Sequence
  Description of Artificial Sequence: Synthetic oligonucleotide
  Target: PCSK9; (+) strand; PAM type: YTN; PAM sequence: CTT
atgcatagggttctcatcta

SEQ ID NO: 28489 - DNA, 20 bp, Artificial Sequence
  Description of Artificial Sequence: Synthetic oligonucleotide
  Target: PCSK9; (+) strand; PAM type: YTN; PAM sequence: TTA
tgcatagggttctcatctag

SEQ ID NO: 28490 - DNA, 20 bp, Artificial Sequence
  Description of Artificial Sequence: Synthetic oligonucleotide
  Target: PCSK9; (+) strand; PAM type: YTN; PAM sequence: TTC
tcatctagacccatctgaaa

SEQ ID NO: 28491 - DNA, 20 bp, Artificial Sequence
  Description of Artificial Sequence: Synthetic oligonucleotide
  Target: PCSK9; (+) strand; PAM type: YTN; PAM sequence: CTC
atctagacccatctgaaatt

SEQ ID NO: 28492 - DNA, 20 bp, Artificial Sequence
  Description of Artificial Sequence: Synthetic oligonucleotide
  Target: PCSK9; (+) strand; PAM type: YTN; PAM sequence: CTA
gacccatctgaaattctata

SEQ ID NO: 28493 - DNA, 20 bp, Artificial Sequence
  Description of Artificial Sequence: Synthetic oligonucleotide
  Target: PCSK9; (+) strand; PAM type: YTN; PAM sequence: CTG
aaattctatacaaataggga

SEQ ID NO: 28494 - DNA, 20 bp, Artificial Sequence
  Description of Artificial Sequence: Synthetic oligonucleotide
  Target: PCSK9; (+) strand; PAM type: YTN; PAM sequence: TTC
tatacaaatagggagacata

SEQ ID NO: 28495 - DNA, 20 bp, Artificial Sequence
  Description of Artificial Sequence: Synthetic oligonucleotide
  Target: PCSK9; (+) strand; PAM type: YTN; PAM sequence: CTA
tacaaatagggagacatatt

SEQ ID NO: 28496 - DNA, 20 bp, Artificial Sequence
  Description of Artificial Sequence: Synthetic oligonucleotide
  Target: PCSK9; (+) strand; PAM type: YTN; PAM sequence: TTA
aatacaaaggtctgtgtaaa

SEQ ID NO: 28497 - DNA, 20 bp, Artificial Sequence
  Description of Artificial Sequence: Synthetic oligonucleotide
  Target: PCSK9; (+) strand; PAM type: YTN; PAM sequence: CTG
tgtaaattgacttaattact

SEQ ID NO: 28498 - DNA, 20 bp, Artificial Sequence
  Description of Artificial Sequence: Synthetic oligonucleotide
  Target: PCSK9; (+) strand; PAM type: YTN; PAM sequence: TTG
acttaattactattttacaa

SEQ ID NO: 28499 - DNA, 20 bp, Artificial Sequence
  Description of Artificial Sequence: Synthetic oligonucleotide
  Target: PCSK9; (+) strand; PAM type: YTN; PAM sequence: CTT
aattactattttacaatgaa

SEQ ID NO: 28500 - DNA, 20 bp, Artificial Sequence
  Description of Artificial Sequence: Synthetic oligonucleotide
  Target: PCSK9; (+) strand; PAM type: YTN; PAM sequence: TTA
attactattttacaatgaaa

SEQ ID NO: 28501 - DNA, 20 bp, Artificial Sequence
  Description of Artificial Sequence: Synthetic oligonucleotide
  Target: PCSK9; (+) strand; PAM type: YTN; PAM sequence: TTA
ctattttacaatgaaaagga

SEQ ID NO: 28502 - DNA, 20 bp, Artificial Sequence
  Description of Artificial Sequence: Synthetic oligonucleotide
  Target: PCSK9; (+) strand; PAM type: YTN; PAM sequence: CTA
ttttacaatgaaaaggaatt

SEQ ID NO: 28503 - DNA, 20 bp, Artificial Sequence
  Description of Artificial Sequence: Synthetic oligonucleotide
  Target: PCSK9; (+) strand; PAM type: YTN; PAM sequence: TTT
tacaatgaaaaggaatttta

SEQ ID NO: 28504 - DNA, 20 bp, Artificial Sequence
  Description of Artificial Sequence: Synthetic oligonucleotide
  Target: PCSK9; (+) strand; PAM type: YTN; PAM sequence: TTT
acaatgaaaaggaattttat

SEQ ID NO: 28505 - DNA, 20 bp, Artificial Sequence
  Description of Artificial Sequence: Synthetic oligonucleotide
  Target: PCSK9; (+) strand; PAM type: YTN; PAM sequence: TTA
caatgaaaaggaattttatt

SEQ ID NO: 28506 - DNA, 20 bp, Artificial Sequence
  Description of Artificial Sequence: Synthetic oligonucleotide
  Target: PCSK9; (+) strand; PAM type: YTN; PAM sequence: TTT
tattacatctttacatcatt

SEQ ID NO: 28507 - DNA, 20 bp, Artificial Sequence
  Description of Artificial Sequence: Synthetic oligonucleotide
  Target: PCSK9; (+) strand; PAM type: YTN; PAM sequence: TTT
attacatctttacatcattt

SEQ ID NO: 28508 - DNA, 20 bp, Artificial Sequence
  Description of Artificial Sequence: Synthetic oligonucleotide
  Target: PCSK9; (+) strand; PAM type: YTN; PAM sequence: TTA
ttacatctttacatcatttt

SEQ ID NO: 28509 - DNA, 20 bp, Artificial Sequence
  Description of Artificial Sequence: Synthetic oligonucleotide
  Target: PCSK9; (+) strand; PAM type: YTN; PAM sequence: TTA
catctttacatcattttaaa

SEQ ID NO: 28510 - DNA, 20 bp, Artificial Sequence
  Description of Artificial Sequence: Synthetic oligonucleotide
  Target: PCSK9; (+) strand; PAM type: YTN; PAM sequence: CTT
tacatcattttaaattggat

SEQ ID NO: 28511 - DNA, 20 bp, Artificial Sequence
  Description of Artificial Sequence: Synthetic oligonucleotide
  Target: PCSK9; (+) strand; PAM type: YTN; PAM sequence: TTT
acatcattttaaattggata

SEQ ID NO: 28512 - DNA, 20 bp, Artificial Sequence
  Description of Artificial Sequence: Synthetic oligonucleotide
  Target: PCSK9; (+) strand; PAM type: YTN; PAM sequence: TTA
catcattttaaattggatat

SEQ ID NO: 28513 - DNA, 20 bp, Artificial Sequence
  Description of Artificial Sequence: Synthetic oligonucleotide
  Target: PCSK9; (+) strand; PAM type: YTN; PAM sequence: TTT
taaattggatattcctgttt

SEQ ID NO: 28514 - DNA, 20 bp, Artificial Sequence
  Description of Artificial Sequence: Synthetic oligonucleotide
  Target: PCSK9; (+) strand; PAM type: YTN; PAM sequence: TTT
aaattggatattcctgttta

SEQ ID NO: 28515 - DNA, 20 bp, Artificial Sequence
  Description of Artificial Sequence: Synthetic oligonucleotide
  Target: PCSK9; (+) strand; PAM type: YTN; PAM sequence: TTA
aattggatattcctgtttaa

SEQ ID NO: 28516 - DNA, 20 bp, Artificial Sequence
  Description of Artificial Sequence: Synthetic oligonucleotide
  Target: PCSK9; (+) strand; PAM type: YTN; PAM sequence: TTG
gatattcctgtttaatatta

SEQ ID NO: 28517 - DNA, 20 bp, Artificial Sequence
  Description of Artificial Sequence: Synthetic oligonucleotide
  Target: PCSK9; (+) strand; PAM type: YTN; PAM sequence: TTC
ctgtttaatattactgcaag

SEQ ID NO: 28518 - DNA, 20 bp, Artificial Sequence
  Description of Artificial Sequence: Synthetic oligonucleotide
  Target: PCSK9; (+) strand; PAM type: YTN; PAM sequence: CTG
tttaatattactgcaagatt

SEQ ID NO: 28519 - DNA, 20 bp, Artificial Sequence
  Description of Artificial Sequence: Synthetic oligonucleotide
  Target: PCSK9; (+) strand; PAM type: YTN; PAM sequence: TTT
aatattactgcaagattaaa

SEQ ID NO: 28520 - DNA, 20 bp, Artificial Sequence
  Description of Artificial Sequence: Synthetic oligonucleotide
  Target: PCSK9; (+) strand; PAM type: YTN; PAM sequence: TTA
atattactgcaagattaaaa

SEQ ID NO: 28521 - DNA, 20 bp, Artificial Sequence
  Description of Artificial Sequence: Synthetic oligonucleotide
  Target: PCSK9; (+) strand; PAM type: YTN; PAM sequence: TTA
ctgcaagattaaaaatttgc

SEQ ID NO: 28522 - DNA, 20 bp, Artificial Sequence
  Description of Artificial Sequence: Synthetic oligonucleotide
  Target: PCSK9; (+) strand; PAM type: YTN; PAM sequence: CTG
caagattaaaaatttgcccc

SEQ ID NO: 28523 - DNA, 20 bp, Artificial Sequence
  Description of Artificial Sequence: Synthetic oligonucleotide
  Target: PCSK9; (+) strand; PAM type: YTN; PAM sequence: TTA
aaaatttgcccccacatatc

SEQ ID NO: 28524 - DNA, 20 bp, Artificial Sequence
  Description of Artificial Sequence: Synthetic oligonucleotide
  Target: PCSK9; (+) strand; PAM type: YTN; PAM sequence: TTT
gcccccacatatctaaaagc

SEQ ID NO: 28525 - DNA, 20 bp, Artificial Sequence
  Description of Artificial Sequence: Synthetic oligonucleotide
  Target: PCSK9; (+) strand; PAM type: YTN; PAM sequence: TTG
cccccacatatctaaaagca

SEQ ID NO: 28526 - DNA, 20 bp, Artificial Sequence
  Description of Artificial Sequence: Synthetic oligonucleotide
  Target: PCSK9; (+) strand; PAM type: YTN; PAM sequence: CTA
aaagcagcttgctttttctt

SEQ ID NO: 28527 - DNA, 20 bp, Artificial Sequence
  Description of Artificial Sequence: Synthetic oligonucleotide
  Target: PCSK9; (+) strand; PAM type: YTN; PAM sequence: CTT
gctttttcttaaaatataaa

SEQ ID NO: 28528 - DNA, 20 bp, Artificial Sequence
  Description of Artificial Sequence: Synthetic oligonucleotide
  Target: PCSK9; (+) strand; PAM type: YTN; PAM sequence: TTG
ctttttcttaaaatataaaa

SEQ ID NO: 28529 - DNA, 20 bp, Artificial Sequence
  Description of Artificial Sequence: Synthetic oligonucleotide
  Target: PCSK9; (+) strand; PAM type: YTN; PAM sequence: CTT
tttcttaaaatataaaaacc

SEQ ID NO: 28530 - DNA, 20 bp, Artificial Sequence
  Description of Artificial Sequence: Synthetic oligonucleotide
  Target: PCSK9; (+) strand; PAM type: YTN; PAM sequence: TTT
ttcttaaaatataaaaacca

SEQ ID NO: 28531 - DNA, 20 bp, Artificial Sequence
  Description of Artificial Sequence: Synthetic oligonucleotide
  Target: PCSK9; (+) strand; PAM type: YTN; PAM sequence: TTT
tcttaaaatataaaaaccaa

SEQ ID NO: 28532 - DNA, 20 bp, Artificial Sequence
  Description of Artificial Sequence: Synthetic oligonucleotide
  Target: PCSK9; (+) strand; PAM type: YTN; PAM sequence: TTT
cttaaaatataaaaaccaaa

SEQ ID NO: 28533 - DNA, 20 bp, Artificial Sequence
  Description of Artificial Sequence: Synthetic oligonucleotide
  Target: PCSK9; (+) strand; PAM type: YTN; PAM sequence: TTC
ttaaaatataaaaaccaaag

SEQ ID NO: 28534 - DNA, 20 bp, Artificial Sequence
  Description of Artificial Sequence: Synthetic oligonucleotide
  Target: PCSK9; (+) strand; PAM type: YTN; PAM sequence: CTT
aaaatataaaaaccaaagga

SEQ ID NO: 28535 - DNA, 20 bp, Artificial Sequence
  Description of Artificial Sequence: Synthetic oligonucleotide
  Target: PCSK9; (+) strand; PAM type: YTN; PAM sequence: TTA
aaatataaaaaccaaaggaa

SEQ ID NO: 28536 - DNA, 20 bp, Artificial Sequence
  Description of Artificial Sequence: Synthetic oligonucleotide
  Target: PCSK9; (+) strand; PAM type: YTN; PAM sequence: TTT
cttttgtagcatcgtagaga

SEQ ID NO: 28537 - DNA, 20 bp, Artificial Sequence
  Description of Artificial Sequence: Synthetic oligonucleotide
  Target: PCSK9; (+) strand; PAM type: YTN; PAM sequence: TTC
ttttgtagcatcgtagagaa

SEQ ID NO: 28538 - DNA, 20 bp, Artificial Sequence
  Description of Artificial Sequence: Synthetic oligonucleotide
  Target: PCSK9; (+) strand; PAM type: YTN; PAM sequence: CTT
ttgtagcatcgtagagaaag

SEQ ID NO: 28539 - DNA, 20 bp, Artificial Sequence
  Description of Artificial Sequence: Synthetic oligonucleotide
  Target: PCSK9; (+) strand; PAM type: YTN; PAM sequence: TTT
tgtagcatcgtagagaaagc

SEQ ID NO: 28540 - DNA, 20 bp, Artificial Sequence
  Description of Artificial Sequence: Synthetic oligonucleotide
  Target: PCSK9; (+) strand; PAM type: YTN; PAM sequence: TTT
gtagcatcgtagagaaagca

SEQ ID NO: 28541 - DNA, 20 bp, Artificial Sequence
  Description of Artificial Sequence: Synthetic oligonucleotide
  Target: PCSK9; (+) strand; PAM type: YTN; PAM sequence: TTG
tagcatcgtagagaaagcaa

SEQ ID NO: 28542 - DNA, 20 bp, Artificial Sequence
  Description of Artificial Sequence: Synthetic oligonucleotide
  Target: PCSK9; (+) strand; PAM type: YTN; PAM sequence: CTT
tatgctcactcttgtatgtt

SEQ ID NO: 28543 - DNA, 20 bp, Artificial Sequence
  Description of Artificial Sequence: Synthetic oligonucleotide
  Target: PCSK9; (+) strand; PAM type: YTN; PAM sequence: TTT
atgctcactcttgtatgttc

SEQ ID NO: 28544 - DNA, 20 bp, Artificial Sequence
  Description of Artificial Sequence: Synthetic oligonucleotide
  Target: PCSK9; (+) strand; PAM type: YTN; PAM sequence: TTA
tgctcactcttgtatgttcg

SEQ ID NO: 28545 - DNA, 20 bp, Artificial Sequence
  Description of Artificial Sequence: Synthetic oligonucleotide
  Target: PCSK9; (+) strand; PAM type: YTN; PAM sequence: CTC
actcttgtatgttcgtgtaa

SEQ ID NO: 28546 - DNA, 20 bp, Artificial Sequence
  Description of Artificial Sequence: Synthetic oligonucleotide
  Target: PCSK9; (+) strand; PAM type: YTN; PAM sequence: CTC
ttgtatgttcgtgtaacaaa

SEQ ID NO: 28547 - DNA, 20 bp, Artificial Sequence
  Description of Artificial Sequence: Synthetic oligonucleotide
  Target: PCSK9; (+) strand; PAM type: YTN; PAM sequence: CTT
gtatgttcgtgtaacaaaaa

SEQ ID NO: 28548 - DNA, 20 bp, Artificial Sequence
  Description of Artificial Sequence: Synthetic oligonucleotide
  Target: PCSK9; (+) strand; PAM type: YTN; PAM sequence: TTG
tatgttcgtgtaacaaaaaa

SEQ ID NO: 28549 - DNA, 20 bp, Artificial Sequence
  Description of Artificial Sequence: Synthetic oligonucleotide
  Target: PCSK9; (+) strand; PAM type: YTN; PAM sequence: TTC
gtgtaacaaaaaagtctgcc

SEQ ID NO: 28550 - DNA, 20 bp, Artificial Sequence
  Description of Artificial Sequence: Synthetic oligonucleotide
  Target: PCSK9; (+) strand; PAM type: YTN; PAM sequence: CTG
ccactggctctatttccgaa

SEQ ID NO: 28551 - DNA, 20 bp, Artificial Sequence
  Description of Artificial Sequence: Synthetic oligonucleotide
  Target: PCSK9; (+) strand; PAM type: YTN; PAM sequence: CTG
gctctatttccgaaaatctc

SEQ ID NO: 28552 - DNA, 20 bp, Artificial Sequence
  Description of Artificial Sequence: Synthetic oligonucleotide
  Target: PCSK9; (+) strand; PAM type: YTN; PAM sequence: CTC
tatttccgaaaatctccaca

SEQ ID NO: 28553 - DNA, 20 bp, Artificial Sequence
  Description of Artificial Sequence: Synthetic oligonucleotide
  Target: PCSK9; (+) strand; PAM type: YTN; PAM sequence: CTA
tttccgaaaatctccacaga

SEQ ID NO: 28554 - DNA, 20 bp, Artificial Sequence
  Description of Artificial Sequence: Synthetic oligonucleotide
  Target: PCSK9; (+) strand; PAM type: YTN; PAM sequence: TTT
ccgaaaatctccacagaaat

SEQ ID NO: 28555 - DNA, 20 bp, Artificial Sequence
  Description of Artificial Sequence: Synthetic oligonucleotide
  Target: PCSK9; (+) strand; PAM type: YTN; PAM sequence: TTC
cgaaaatctccacagaaatg

SEQ ID NO: 28556 - DNA, 20 bp, Artificial Sequence
  Description of Artificial Sequence: Synthetic oligonucleotide
  Target: PCSK9; (+) strand; PAM type: YTN; PAM sequence: CTC
cacagaaatgtgaatccaca

SEQ ID NO: 28557 - DNA, 20 bp, Artificial Sequence
  Description of Artificial Sequence: Synthetic oligonucleotide
  Target: PCSK9; (+) strand; PAM type: YTN; PAM sequence: CTC
ccgggacagctgatccacat

SEQ ID NO: 28558 - DNA, 20 bp, Artificial Sequence
  Description of Artificial Sequence: Synthetic oligonucleotide
  Target: PCSK9; (+) strand; PAM type: YTN; PAM sequence: CTG
atccacatgccggagttctc

SEQ ID NO: 28559 - DNA, 20 bp, Artificial Sequence
  Description of Artificial Sequence: Synthetic oligonucleotide
  Target: PCSK9; (+) strand; PAM type: YTN; PAM sequence: TTC
tcccactgccaaacagctcc

SEQ ID NO: 28560 - DNA, 20 bp, Artificial Sequence
  Description of Artificial Sequence: Synthetic oligonucleotide
  Target: PCSK9; (+) strand; PAM type: YTN; PAM sequence: CTC
ccactgccaaacagctccca

SEQ ID NO: 28561 - DNA, 20 bp, Artificial Sequence
  Description of Artificial Sequence: Synthetic oligonucleotide
  Target: PCSK9; (+) strand; PAM type: YTN; PAM sequence: CTG
ccaaacagctcccaaacctt

SEQ ID NO: 28562 - DNA, 20 bp, Artificial Sequence
  Description of Artificial Sequence: Synthetic oligonucleotide
  Target: PCSK9; (+) strand; PAM type: YTN; PAM sequence: CTC
ccaaaccttctagtggctta

SEQ ID NO: 28563 - DNA, 20 bp, Artificial Sequence
  Description of Artificial Sequence: Synthetic oligonucleotide
  Target: PCSK9; (+) strand; PAM type: YTN; PAM sequence: CTT
ctagtggcttaaaaatgctt

SEQ ID NO: 28564 - DNA, 20 bp, Artificial Sequence
  Description of Artificial Sequence: Synthetic oligonucleotide
  Target: PCSK9; (+) strand; PAM type: YTN; PAM sequence: TTC
tagtggcttaaaaatgcttt

SEQ ID NO: 28565 - DNA, 20 bp, Artificial Sequence
  Description of Artificial Sequence: Synthetic oligonucleotide
  Target: PCSK9; (+) strand; PAM type: YTN; PAM sequence: CTA
gtggcttaaaaatgctttcc

SEQ ID NO: 28566 - DNA, 20 bp, Artificial Sequence
  Description of Artificial Sequence: Synthetic oligonucleotide
  Target: PCSK9; (+) strand; PAM type: YTN; PAM sequence: CTT
aaaaatgctttccttgagaa

SEQ ID NO: 28567 - DNA, 20 bp, Artificial Sequence
  Description of Artificial Sequence: Synthetic oligonucleotide
  Target: PCSK9; (+) strand; PAM type: YTN; PAM sequence: TTA
aaaatgctttccttgagaaa

SEQ ID NO: 28568 - DNA, 20 bp, Artificial Sequence
  Description of Artificial Sequence: Synthetic oligonucleotide
  Target: PCSK9; (+) strand; PAM type: YTN; PAM sequence: CTT
tccttgagaaatacacgatc

SEQ ID NO: 28569 - DNA, 20 bp, Artificial Sequence
  Description of Artificial Sequence: Synthetic oligonucleotide
  Target: PCSK9; (+) strand; PAM type: YTN; PAM sequence: TTT
ccttgagaaatacacgatcc

SEQ ID NO: 28570 - DNA, 20 bp, Artificial Sequence
  Description of Artificial Sequence: Synthetic oligonucleotide
  Target: PCSK9; (+) strand; PAM type: YTN; PAM sequence: TTC
cttgagaaatacacgatccg

SEQ ID NO: 28571 - DNA, 20 bp, Artificial Sequence
  Description of Artificial Sequence: Synthetic oligonucleotide
  Target: PCSK9; (+) strand; PAM type: YTN; PAM sequence: CTT
gagaaatacacgatccgccc

SEQ ID NO: 28572 - DNA, 20 bp, Artificial Sequence
  Description of Artificial Sequence: Synthetic oligonucleotide
  Target: PCSK9; (+) strand; PAM type: YTN; PAM sequence: TTG
agaaatacacgatccgccca

SEQ ID NO: 28573 - DNA, 20 bp, Artificial Sequence
  Description of Artificial Sequence: Synthetic oligonucleotide
  Target: PCSK9; (+) strand; PAM type: YTN; PAM sequence: CTT
tcccagtccaatctccaggc

SEQ ID NO: 28574 - DNA, 20 bp, Artificial Sequence
  Description of Artificial Sequence: Synthetic oligonucleotide
  Target: PCSK9; (+) strand; PAM type: YTN; PAM sequence: TTT
cccagtccaatctccaggct

SEQ ID NO: 28575 - DNA, 20 bp, Artificial Sequence
  Description of Artificial Sequence: Synthetic oligonucleotide
  Target: PCSK9; (+) strand; PAM type: YTN; PAM sequence: TTC
ccagtccaatctccaggctc

SEQ ID NO: 28576 - DNA, 20 bp, Artificial Sequence
  Description of Artificial Sequence: Synthetic oligonucleotide
  Target: PCSK9; (+) strand; PAM type: YTN; PAM sequence: CTC
caggctcttccaaagggttc

SEQ ID NO: 28577 - DNA, 20 bp, Artificial Sequence
  Description of Artificial Sequence: Synthetic oligonucleotide
  Target: PCSK9; (+) strand; PAM type: YTN; PAM sequence: CTC
ttccaaagggttcgagattc

SEQ ID NO: 28578 - DNA, 20 bp, Artificial Sequence
  Description of Artificial Sequence: Synthetic oligonucleotide
  Target: PCSK9; (+) strand; PAM type: YTN; PAM sequence: CTT
ccaaagggttcgagattctg

SEQ ID NO: 28579 - DNA, 20 bp, Artificial Sequence
  Description of Artificial Sequence: Synthetic oligonucleotide
  Target: PCSK9; (+) strand; PAM type: YTN; PAM sequence: TTC
caaagggttcgagattctga

SEQ ID NO: 28580 - DNA, 20 bp, Artificial Sequence
  Description of Artificial Sequence: Synthetic oligonucleotide
  Target: PCSK9; (+) strand; PAM type: YTN; PAM sequence: TTC
gagattctgattccaagaag

SEQ ID NO: 28581 - DNA, 20 bp, Artificial Sequence
  Description of Artificial Sequence: Synthetic oligonucleotide
  Target: PCSK9; (+) strand; PAM type: YTN; PAM sequence: TTC
tgattccaagaaggtgctga

SEQ ID NO: 28582 - DNA, 20 bp, Artificial Sequence
  Description of Artificial Sequence: Synthetic oligonucleotide
  Target: PCSK9; (+) strand; PAM type: YTN; PAM sequence: CTG
attccaagaaggtgctgagc

SEQ ID NO: 28583 - DNA, 20 bp, Artificial Sequence
  Description of Artificial Sequence: Synthetic oligonucleotide
  Target: PCSK9; (+) strand; PAM type: YTN; PAM sequence: TTC
caagaaggtgctgagcatcc

SEQ ID NO: 28584 - DNA, 20 bp, Artificial Sequence
  Description of Artificial Sequence: Synthetic oligonucleotide
  Target: PCSK9; (+) strand; PAM type: YTN; PAM sequence: CTG
agcatccagtattgtgtctt

SEQ ID NO: 28585 - DNA, 20 bp, Artificial Sequence
  Description of Artificial Sequence: Synthetic oligonucleotide
  Target: PCSK9; (+) strand; PAM type: YTN; PAM sequence: TTG
tgtcttgactcctctcaggc

SEQ ID NO: 28586 - DNA, 20 bp, Artificial Sequence
  Description of Artificial Sequence: Synthetic oligonucleotide
  Target: PCSK9; (+) strand; PAM type: YTN; PAM sequence: CTT
gactcctctcaggctgggca

SEQ ID NO: 28587 - DNA, 20 bp, Artificial Sequence
  Description of Artificial Sequence: Synthetic oligonucleotide
  Target: PCSK9; (+) strand; PAM type: YTN; PAM sequence: TTG
actcctctcaggctgggcat

SEQ ID NO: 28588 - DNA, 20 bp, Artificial Sequence
  Description of Artificial Sequence: Synthetic oligonucleotide
  Target: PCSK9; (+) strand; PAM type: YTN; PAM sequence: CTC
ctctcaggctgggcatgttc

SEQ ID NO: 28589 - DNA, 20 bp, Artificial Sequence
  Description of Artificial Sequence: Synthetic oligonucleotide
  Target: PCSK9; (+) strand; PAM type: YTN; PAM sequence: CTC
tcaggctgggcatgttcctc

SEQ ID NO: 28590 - DNA, 20 bp, Artificial Sequence
  Description of Artificial Sequence: Synthetic oligonucleotide
  Target: PCSK9; (+) strand; PAM type: YTN; PAM sequence: CTC
aggctgggcatgttcctcta

SEQ ID NO: 28591 - DNA, 20 bp, Artificial Sequence
  Description of Artificial Sequence: Synthetic oligonucleotide
  Target: PCSK9; (+) strand; PAM type: YTN; PAM sequence: CTG
ggcatgttcctctagggatc

SEQ ID NO: 28592 - DNA, 20 bp, Artificial Sequence
  Description of Artificial Sequence: Synthetic oligonucleotide
  Target: PCSK9; (+) strand; PAM type: YTN; PAM sequence: TTC
ctctagggatcaacatcatc

SEQ ID NO: 28593 - DNA, 20 bp, Artificial Sequence
  Description of Artificial Sequence: Synthetic oligonucleotide
  Target: PCSK9; (+) strand; PAM type: YTN; PAM sequence: CTC
tagggatcaacatcatcaag

SEQ ID NO: 28594 - DNA, 20 bp, Artificial Sequence
  Description of Artificial Sequence: Synthetic oligonucleotide
  Target: PCSK9; (+) strand; PAM type: YTN; PAM sequence: CTA
gggatcaacatcatcaaggt

SEQ ID NO: 28595 - DNA, 20 bp, Artificial Sequence
  Description of Artificial Sequence: Synthetic oligonucleotide
  Target: PCSK9; (+) strand; PAM type: YTN; PAM sequence: CTT
ctcaactcaccaatcatcat

SEQ ID NO: 28596 - DNA, 20 bp, Artificial Sequence
  Description of Artificial Sequence: Synthetic oligonucleotide
  Target: PCSK9; (+) strand; PAM type: YTN; PAM sequence: TTC
tcaactcaccaatcatcatg

SEQ ID NO: 28597 - DNA, 20 bp, Artificial Sequence
  Description of Artificial Sequence: Synthetic oligonucleotide
  Target: PCSK9; (+) strand; PAM type: YTN; PAM sequence: CTC
aactcaccaatcatcatggg

SEQ ID NO: 28598 - DNA, 20 bp, Artificial Sequence
  Description of Artificial Sequence: Synthetic oligonucleotide
  Target: PCSK9; (+) strand; PAM type: YTN; PAM sequence: CTC
accaatcatcatgggagatt

SEQ ID NO: 28599 - DNA, 20 bp, Artificial Sequence
  Description of Artificial Sequence: Synthetic oligonucleotide
  Target: PCSK9; (+) strand; PAM type: YTN; PAM sequence: TTC
tgaaccctgcagaaaagaaa

SEQ ID NO: 28600 - DNA, 20 bp, Artificial Sequence
  Description of Artificial Sequence: Synthetic oligonucleotide
  Target: PCSK9; (+) strand; PAM type: YTN; PAM sequence: CTG
aaccctgcagaaaagaaaag

SEQ ID NO: 28601 - DNA, 20 bp, Artificial Sequence
  Description of Artificial Sequence: Synthetic oligonucleotide
  Target: PCSK9; (+) strand; PAM type: YTN; PAM sequence: CTG
cagaaaagaaaaggaagtta

SEQ ID NO: 28602 - DNA, 20 bp, Artificial Sequence
  Description of Artificial Sequence: Synthetic oligonucleotide
  Target: PCSK9; (+) strand; PAM type: YTN; PAM sequence: TTA
aagttcatacggttagagaa

SEQ ID NO: 28603 - DNA, 20 bp, Artificial Sequence
  Description of Artificial Sequence: Synthetic oligonucleotide
  Target: PCSK9; (+) strand; PAM type: YTN; PAM sequence: TTC
atacggttagagaaaaggtt

SEQ ID NO: 28604 - DNA, 20 bp, Artificial Sequence
  Description of Artificial Sequence: Synthetic oligonucleotide
  Target: PCSK9; (+) strand; PAM type: YTN; PAM sequence: TTA
gagaaaaggttttctatgct

SEQ ID NO: 28605 - DNA, 20 bp, Artificial Sequence
  Description of Artificial Sequence: Synthetic oligonucleotide
  Target: PCSK9; (+) strand; PAM type: YTN; PAM sequence: TTT
tctatgctgacttgtgttct

SEQ ID NO: 28606 - DNA, 20 bp, Artificial Sequence
  Description of Artificial Sequence: Synthetic oligonucleotide
  Target: PCSK9; (+) strand; PAM type: YTN; PAM sequence: TTT
ctatgctgacttgtgttctg

SEQ ID NO: 28607 - DNA, 20 bp, Artificial Sequence
  Description of Artificial Sequence: Synthetic oligonucleotide
  Target: PCSK9; (+) strand; PAM type: YTN; PAM sequence: TTC
tatgctgacttgtgttctgc

SEQ ID NO: 28608 - DNA, 20 bp, Artificial Sequence
  Description of Artificial Sequence: Synthetic oligonucleotide
  Target: PCSK9; (+) strand; PAM type: YTN; PAM sequence: CTA
tgctgacttgtgttctgcaa

SEQ ID NO: 28609 - DNA, 20 bp, Artificial Sequence
  Description of Artificial Sequence: Synthetic oligonucleotide
  Target: PCSK9; (+) strand; PAM type: YTN; PAM sequence: CTG
acttgtgttctgcaatttaa

SEQ ID NO: 28610 - DNA, 20 bp, Artificial Sequence
  Description of Artificial Sequence: Synthetic oligonucleotide
  Target: PCSK9; (+) strand; PAM type: YTN; PAM sequence: CTT
gtgttctgcaatttaaacat

SEQ ID NO: 28611 - DNA, 20 bp, Artificial Sequence
  Description of Artificial Sequence: Synthetic oligonucleotide
  Target: PCSK9; (+) strand; PAM type: YTN; PAM sequence: TTG
tgttctgcaatttaaacatg

SEQ ID NO: 28612 - DNA, 20 bp, Artificial Sequence
  Description of Artificial Sequence: Synthetic oligonucleotide
  Target: PCSK9; (+) strand; PAM type: YTN; PAM sequence: TTC
tgcaatttaaacatgtcttc

SEQ ID NO: 28613 - DNA, 20 bp, Artificial Sequence
  Description of Artificial Sequence: Synthetic oligonucleotide
  Target: PCSK9; (+) strand; PAM type: YTN; PAM sequence: CTG
caatttaaacatgtcttcat

SEQ ID NO: 28614 - DNA, 20 bp, Artificial Sequence
  Description of Artificial Sequence: Synthetic oligonucleotide
  Target: PCSK9; (+) strand; PAM type: YTN; PAM sequence: TTT
aaacatgtcttcatctggca

SEQ ID NO: 28615 - DNA, 20 bp, Artificial Sequence
  Description of Artificial Sequence: Synthetic oligonucleotide
  Target: PCSK9; (+) strand; PAM type: YTN; PAM sequence: TTA
aacatgtcttcatctggcaa

SEQ ID NO: 28616 - DNA, 20 bp, Artificial Sequence
  Description of Artificial Sequence: Synthetic oligonucleotide
  Target: PCSK9; (+) strand; PAM type: YTN; PAM sequence: CTT
catctggcaacttaatgcaa

SEQ ID NO: 28617 - DNA, 20 bp, Artificial Sequence
  Description of Artificial Sequence: Synthetic oligonucleotide
  Target: PCSK9; (+) strand; PAM type: YTN; PAM sequence: TTC
atctggcaacttaatgcaat

SEQ ID NO: 28618 - DNA, 20 bp, Artificial Sequence
  Description of Artificial Sequence: Synthetic oligonucleotide
  Target: PCSK9; (+) strand; PAM type: YTN; PAM sequence: CTG
gcaacttaatgcaatgttta

SEQ ID NO: 28619 - DNA, 20 bp, Artificial Sequence
  Description of Artificial Sequence: Synthetic oligonucleotide
  Target: PCSK9; (+) strand; PAM type: YTN; PAM sequence: CTT
aatgcaatgtttatcaaagg

SEQ ID NO: 28620 - DNA, 20 bp, Artificial Sequence
  Description of Artificial Sequence: Synthetic oligonucleotide
  Target: PCSK9; (+) strand; PAM type: YTN; PAM sequence: TTA
atgcaatgtttatcaaaggg

SEQ ID NO: 28621 - DNA, 20 bp, Artificial Sequence
  Description of Artificial Sequence: Synthetic oligonucleotide
  Target: PCSK9; (+) strand; PAM type: YTN; PAM sequence: TTT
atcaaagggtaataaaatgt

SEQ ID NO: 28622 - DNA, 20 bp, Artificial Sequence
  Description of Artificial Sequence: Synthetic oligonucleotide
  Target: PCSK9; (+) strand; PAM type: YTN; PAM sequence: TTA
tcaaagggtaataaaatgtg

SEQ ID NO: 28623 - DNA, 20 bp, Artificial Sequence
  Description of Artificial Sequence: Synthetic oligonucleotide
  Target: PCSK9; (+) strand; PAM type: YTN; PAM sequence: CTA
ttacatctaatatttgacaa

SEQ ID NO: 28624 - DNA, 20 bp, Artificial Sequence
  Description of Artificial Sequence: Synthetic oligonucleotide
  Target: PCSK9; (+) strand; PAM type: YTN; PAM sequence: TTA
catctaatatttgacaattc

SEQ ID NO: 28625 - DNA, 20 bp, Artificial Sequence
  Description of Artificial Sequence: Synthetic oligonucleotide
  Target: PCSK9; (+) strand; PAM type: YTN; PAM sequence: CTA
atatttgacaattcatgatt

SEQ ID NO: 28626 - DNA, 20 bp, Artificial Sequence
  Description of Artificial Sequence: Synthetic oligonucleotide
  Target: PCSK9; (+) strand; PAM type: YTN; PAM sequence: TTT
gacaattcatgattatgtaa

SEQ ID NO: 28627 - DNA, 20 bp, Artificial Sequence
  Description of Artificial Sequence: Synthetic oligonucleotide
  Target: PCSK9; (+) strand; PAM type: YTN; PAM sequence: TTG
acaattcatgattatgtaaa

SEQ ID NO: 28628 - DNA, 20 bp, Artificial Sequence
  Description of Artificial Sequence: Synthetic oligonucleotide
  Target: PCSK9; (+) strand; PAM type: YTN; PAM sequence: TTC
atgattatgtaaaacatgta

SEQ ID NO: 28629 - DNA, 20 bp, Artificial Sequence
  Description of Artificial Sequence: Synthetic oligonucleotide
  Target: PCSK9; (+) strand; PAM type: YTN; PAM sequence: TTA
tgtaaaacatgtacatttct

SEQ ID NO: 28630 - DNA, 20 bp, Artificial Sequence
  Description of Artificial Sequence: Synthetic oligonucleotide
  Target: PCSK9; (+) strand; PAM type: YTN; PAM sequence: TTT
ctatgatctcatttagtcag

SEQ ID NO: 28631 - DNA, 20 bp, Artificial Sequence
  Description of Artificial Sequence: Synthetic oligonucleotide
  Target: PCSK9; (+) strand; PAM type: YTN; PAM sequence: TTC
tatgatctcatttagtcagt

SEQ ID NO: 28632 - DNA, 20 bp, Artificial Sequence
  Description of Artificial Sequence: Synthetic oligonucleotide
  Target: PCSK9; (+) strand; PAM type: YTN; PAM sequence: CTA
tgatctcatttagtcagtga

SEQ ID NO: 28633 - DNA, 20 bp, Artificial Sequence
  Description of Artificial Sequence: Synthetic oligonucleotide
  Target: PCSK9; (+) strand; PAM type: YTN; PAM sequence: CTC
atttagtcagtgaaacaacc

SEQ ID NO: 28634 - DNA, 20 bp, Artificial Sequence
  Description of Artificial Sequence: Synthetic oligonucleotide
  Target: PCSK9; (+) strand; PAM type: YTN; PAM sequence: TTT
agtcagtgaaacaacccagc

SEQ ID NO: 28635 - DNA, 20 bp, Artificial Sequence
  Description of Artificial Sequence: Synthetic oligonucleotide
  Target: PCSK9; (+) strand; PAM type: YTN; PAM sequence: TTA
gtcagtgaaacaacccagcg

SEQ ID NO: 28636 - DNA, 20 bp, Artificial Sequence
  Description of Artificial Sequence: Synthetic oligonucleotide
  Target: PCSK9; (+) strand; PAM type: YTN; PAM sequence: CTT
gtctaaagtcacaatgctac

SEQ ID NO: 28637 - DNA, 20 bp, Artificial Sequence
  Description of Artificial Sequence: Synthetic oligonucleotide
  Target: PCSK9; (+) strand; PAM type: YTN; PAM sequence: TTG
tctaaagtcacaatgctact

SEQ ID NO: 28638 - DNA, 20 bp, Artificial Sequence
  Description of Artificial Sequence: Synthetic oligonucleotide
  Target: PCSK9; (+) strand; PAM type: YTN; PAM sequence: CTA
aagtcacaatgctactctgc

SEQ ID NO: 28639 - DNA, 20 bp, Artificial Sequence
  Description of Artificial Sequence: Synthetic oligonucleotide
  Target: PCSK9; (+) strand; PAM type: YTN; PAM sequence: CTA
ctctgcacccatgtgagaac

SEQ ID NO: 28640 - DNA, 20 bp, Artificial Sequence
  Description of Artificial Sequence: Synthetic oligonucleotide
  Target: PCSK9; (+) strand; PAM type: YTN; PAM sequence: CTC
tgcacccatgtgagaacgca

SEQ ID NO: 28641 - DNA, 20 bp, Artificial Sequence
  Description of Artificial Sequence: Synthetic oligonucleotide
  Target: PCSK9; (+) strand; PAM type: YTN; PAM sequence: CTG
cacccatgtgagaacgcaga

SEQ ID NO: 28642 - DNA, 20 bp, Artificial Sequence
  Description of Artificial Sequence: Synthetic oligonucleotide
  Target: PCSK9; (+) strand; PAM type: YTN; PAM sequence: CTG
ggagaggcattgatggccat

SEQ ID NO: 28643 - DNA, 20 bp, Artificial Sequence
  Description of Artificial Sequence: Synthetic oligonucleotide
  Target: PCSK9; (+) strand; PAM type: YTN; PAM sequence: TTG
atggccattgtgcccgcttc

SEQ ID NO: 28644 - DNA, 20 bp, Artificial Sequence
  Description of Artificial Sequence: Synthetic oligonucleotide
  Target: PCSK9; (+) strand; PAM type: YTN; PAM sequence: TTG
tgcccgcttcacgttgggca

SEQ ID NO: 28645 - DNA, 20 bp, Artificial Sequence
  Description of Artificial Sequence: Synthetic oligonucleotide
  Target: PCSK9; (+) strand; PAM type: YTN; PAM sequence: CTT
cacgttgggcactgtgtgag

SEQ ID NO: 28646 - DNA, 20 bp, Artificial Sequence
  Description of Artificial Sequence: Synthetic oligonucleotide
  Target: PCSK9; (+) strand; PAM type: YTN; PAM sequence: TTC
acgttgggcactgtgtgagc

SEQ ID NO: 28647 - DNA, 20 bp, Artificial Sequence
  Description of Artificial Sequence: Synthetic oligonucleotide
  Target: PCSK9; (+) strand; PAM type: YTN; PAM sequence: TTG
ggcactgtgtgagcctccct

SEQ ID NO: 28648 - DNA, 20 bp, Artificial Sequence
  Description of Artificial Sequence: Synthetic oligonucleotide
  Target: PCSK9; (+) strand; PAM type: YTN; PAM sequence: CTG
tgtgagcctccctgccctgc

SEQ ID NO: 28649 - DNA, 20 bp, Artificial Sequence
  Description of Artificial Sequence: Synthetic oligonucleotide
  Target: PCSK9; (+) strand; PAM type: YTN; PAM sequence: CTC
cctgccctgcacctgccaaa

SEQ ID NO: 28650 - DNA, 20 bp, Artificial Sequence
  Description of Artificial Sequence: Synthetic oligonucleotide
  Target: PCSK9; (+) strand; PAM type: YTN; PAM sequence: CTG
ccctgcacctgccaaatatg

SEQ ID NO: 28651 - DNA, 20 bp, Artificial Sequence
  Description of Artificial Sequence: Synthetic oligonucleotide
  Target: PCSK9; (+) strand; PAM type: YTN; PAM sequence: CTG
cacctgccaaatatgggctc

SEQ ID NO: 28652 - DNA, 20 bp, Artificial Sequence
  Description of Artificial Sequence: Synthetic oligonucleotide
  Target: PCSK9; (+) strand; PAM type: YTN; PAM sequence: CTG
ccaaatatgggctctgggtc

SEQ ID NO: 28653 - DNA, 20 bp, Artificial Sequence
  Description of Artificial Sequence: Synthetic oligonucleotide
  Target: PCSK9; (+) strand; PAM type: YTN; PAM sequence: CTC
tgggtcactcctgggtctga

SEQ ID NO: 28654 - DNA, 20 bp, Artificial Sequence
  Description of Artificial Sequence: Synthetic oligonucleotide
  Target: PCSK9; (+) strand; PAM type: YTN; PAM sequence: CTG
ggtcactcctgggtctgaag

SEQ ID NO: 28655 - DNA, 20 bp, Artificial Sequence
  Description of Artificial Sequence: Synthetic oligonucleotide
  Target: PCSK9; (+) strand; PAM type: YTN; PAM sequence: CTC
ctgggtctgaaggctacctc

SEQ ID NO: 28656 - DNA, 20 bp, Artificial Sequence
  Description of Artificial Sequence: Synthetic oligonucleotide
  Target: PCSK9; (+) strand; PAM type: YTN; PAM sequence: CTG
ggtctgaaggctacctctgt

SEQ ID NO: 28657 - DNA, 20 bp, Artificial Sequence
  Description of Artificial Sequence: Synthetic oligonucleotide
  Target: PCSK9; (+) strand; PAM type: YTN; PAM sequence: CTG
aaggctacctctgttaccat

SEQ ID NO: 28658 - DNA, 20 bp, Artificial Sequence
  Description of Artificial Sequence: Synthetic oligonucleotide
  Target: PCSK9; (+) strand; PAM type: YTN; PAM sequence: CTA
cctctgttaccatctgtgtg

SEQ ID NO: 28659 - DNA, 20 bp, Artificial Sequence
  Description of Artificial Sequence: Synthetic oligonucleotide
  Target: PCSK9; (+) strand; PAM type: YTN; PAM sequence: CTC
tgttaccatctgtgtggcct

SEQ ID NO: 28660 - DNA, 20 bp, Artificial Sequence
  Description of Artificial Sequence: Synthetic oligonucleotide
  Target: PCSK9; (+) strand; PAM type: YTN; PAM sequence: CTG
ttaccatctgtgtggccttt

SEQ ID NO: 28661 - DNA, 20 bp, Artificial Sequence
  Description of Artificial Sequence: Synthetic oligonucleotide
  Target: PCSK9; (+) strand; PAM type: YTN; PAM sequence: TTA
ccatctgtgtggcctttggc

SEQ ID NO: 28662 - DNA, 20 bp, Artificial Sequence
  Description of Artificial Sequence: Synthetic oligonucleotide
  Target: PCSK9; (+) strand; PAM type: YTN; PAM sequence: CTG
tgtggcctttggcttacaca

SEQ ID NO: 28663 - DNA, 20 bp, Artificial Sequence
  Description of Artificial Sequence: Synthetic oligonucleotide
  Target: PCSK9; (+) strand; PAM type: YTN; PAM sequence: CTT
tggcttacacacttggcgaa

SEQ ID NO: 28664 - DNA, 20 bp, Artificial Sequence
  Description of Artificial Sequence: Synthetic oligonucleotide
  Target: PCSK9; (+) strand; PAM type: YTN; PAM sequence: TTT
ggcttacacacttggcgaat

SEQ ID NO: 28665 - DNA, 20 bp, Artificial Sequence
  Description of Artificial Sequence: Synthetic oligonucleotide
  Target: PCSK9; (+) strand; PAM type: YTN; PAM sequence: TTG
gcttacacacttggcgaatc

SEQ ID NO: 28666 - DNA, 20 bp, Artificial Sequence
  Description of Artificial Sequence: Synthetic oligonucleotide
  Target: PCSK9; (+) strand; PAM type: YTN; PAM sequence: CTT
acacacttggcgaatcgttc

SEQ ID NO: 28667 - DNA, 20 bp, Artificial Sequence
  Description of Artificial Sequence: Synthetic oligonucleotide
  Target: PCSK9; (+) strand; PAM type: YTN; PAM sequence: TTA
cacacttggcgaatcgttct

SEQ ID NO: 28668 - DNA, 20 bp, Artificial Sequence
  Description of Artificial Sequence: Synthetic oligonucleotide
  Target: PCSK9; (+) strand; PAM type: YTN; PAM sequence: CTT
ggcgaatcgttctgaatact

SEQ ID NO: 28669 - DNA, 20 bp, Artificial Sequence
  Description of Artificial Sequence: Synthetic oligonucleotide
  Target: PCSK9; (+) strand; PAM type: YTN; PAM sequence: TTG
gcgaatcgttctgaatactc

SEQ ID NO: 28670 - DNA, 20 bp, Artificial Sequence
  Description of Artificial Sequence: Synthetic oligonucleotide
  Target: PCSK9; (+) strand; PAM type: YTN; PAM sequence: TTC
tgaatactcaccgtgtgcca

SEQ ID NO: 28671 - DNA, 20 bp, Artificial Sequence
  Description of Artificial Sequence: Synthetic oligonucleotide
  Target: PCSK9; (+) strand; PAM type: YTN; PAM sequence: CTG
aatactcaccgtgtgccatg

SEQ ID NO: 28672 - DNA, 20 bp, Artificial Sequence
  Description of Artificial Sequence: Synthetic oligonucleotide
  Target: PCSK9; (+) strand; PAM type: YTN; PAM sequence: CTC
accgtgtgccatggggctga

SEQ ID NO: 28673 - DNA, 20 bp, Artificial Sequence
  Description of Artificial Sequence: Synthetic oligonucleotide
  Target: PCSK9; (+) strand; PAM type: YTN; PAM sequence: CTG
atctagttggagctggggtg

SEQ ID NO: 28674 - DNA, 20 bp, Artificial Sequence
  Description of Artificial Sequence: Synthetic oligonucleotide
  Target: PCSK9; (+) strand; PAM type: YTN; PAM sequence: CTA
gttggagctggggtggggag

SEQ ID NO: 28675 - DNA, 20 bp, Artificial Sequence
  Description of Artificial Sequence: Synthetic oligonucleotide
  Target: PCSK9; (+) strand; PAM type: YTN; PAM sequence: TTG
gagctggggtggggaggagc

SEQ ID NO: 28676 - DNA, 20 bp, Artificial Sequence
  Description of Artificial Sequence: Synthetic oligonucleotide
  Target: PCSK9; (+) strand; PAM type: YTN; PAM sequence: CTG
gggtggggaggagcaaggac

SEQ ID NO: 28677 - DNA, 20 bp, Artificial Sequence
  Description of Artificial Sequence: Synthetic oligonucleotide
  Target: PCSK9; (+) strand; PAM type: YTN; PAM sequence: CTC
tctaaagtgacaacctaagc

SEQ ID NO: 28678 - DNA, 20 bp, Artificial Sequence
  Description of Artificial Sequence: Synthetic oligonucleotide
  Target: PCSK9; (+) strand; PAM type: YTN; PAM sequence: CTC
taaagtgacaacctaagctg

SEQ ID NO: 28679 - DNA, 20 bp, Artificial Sequence
  Description of Artificial Sequence: Synthetic oligonucleotide
  Target: PCSK9; (+) strand; PAM type: YTN; PAM sequence: CTA
aagtgacaacctaagctgag

SEQ ID NO: 28680 - DNA, 20 bp, Artificial Sequence
  Description of Artificial Sequence: Synthetic oligonucleotide
  Target: PCSK9; (+) strand; PAM type: YTN; PAM sequence: CTA
agctgagtgagagttggggg

SEQ ID NO: 28681 - DNA, 20 bp, Artificial Sequence
  Description of Artificial Sequence: Synthetic oligonucleotide
  Target: PCSK9; (+) strand; PAM type: YTN; PAM sequence: CTG
agtgagagttgggggtgagt

SEQ ID NO: 28682 - DNA, 20 bp, Artificial Sequence
  Description of Artificial Sequence: Synthetic oligonucleotide
  Target: PCSK9; (+) strand; PAM type: YTN; PAM sequence: TTG
ggggtgagtaggggggccct

SEQ ID NO: 28683 - DNA, 20 bp, Artificial Sequence
  Description of Artificial Sequence: Synthetic oligonucleotide
  Target: PCSK9; (+) strand; PAM type: YTN; PAM sequence: CTG
aggtggaaggaagagagtac

SEQ ID NO: 28684 - DNA, 20 bp, Artificial Sequence
  Description of Artificial Sequence: Synthetic oligonucleotide
  Target: PCSK9; (+) strand; PAM type: YTN; PAM sequence: TTT
gataaataaaattcagaaaa

SEQ ID NO: 28685 - DNA, 20 bp, Artificial Sequence
  Description of Artificial Sequence: Synthetic oligonucleotide
  Target: PCSK9; (+) strand; PAM type: YTN; PAM sequence: TTG
ataaataaaattcagaaaat

SEQ ID NO: 28686 - DNA, 20 bp, Artificial Sequence
  Description of Artificial Sequence: Synthetic oligonucleotide
  Target: PCSK9; (+) strand; PAM type: YTN; PAM sequence: TTC
agaaaatgggccaggcacag

SEQ ID NO: 28687 - DNA, 20 bp, Artificial Sequence
  Description of Artificial Sequence: Synthetic oligonucleotide
  Target: PCSK9; (+) strand; PAM type: YTN; PAM sequence: CTT
atgcctgtaatcccagctac

SEQ ID NO: 28688 - DNA, 20 bp, Artificial Sequence
  Description of Artificial Sequence: Synthetic oligonucleotide
  Target: PCSK9; (+) strand; PAM type: YTN; PAM sequence: TTA
tgcctgtaatcccagctact

SEQ ID NO: 28689 - DNA, 20 bp, Artificial Sequence
  Description of Artificial Sequence: Synthetic oligonucleotide
  Target: PCSK9; (+) strand; PAM type: YTN; PAM sequence: CTG
taatcccagctacttgggag

SEQ ID NO: 28690 - DNA, 20 bp, Artificial Sequence
  Description of Artificial Sequence: Synthetic oligonucleotide
  Target: PCSK9; (+) strand; PAM type: YTN; PAM sequence: CTA
cttgggaggctgaggcaagg

SEQ ID NO: 28691 - DNA, 20 bp, Artificial Sequence
  Description of Artificial Sequence: Synthetic oligonucleotide
  Target: PCSK9; (+) strand; PAM type: YTN; PAM sequence: CTT
gggaggctgaggcaaggaga

SEQ ID NO: 28692 - DNA, 20 bp, Artificial Sequence
  Description of Artificial Sequence: Synthetic oligonucleotide
  Target: PCSK9; (+) strand; PAM type: YTN; PAM sequence: TTG
ggaggctgaggcaaggagaa

SEQ ID NO: 28693 - DNA, 20 bp, Artificial Sequence
  Description of Artificial Sequence: Synthetic oligonucleotide
  Target: PCSK9; (+) strand; PAM type: YTN; PAM sequence: CTG
aggcaaggagaatcgctgga

SEQ ID NO: 28694 - DNA, 20 bp, Artificial Sequence
  Description of Artificial Sequence: Synthetic oligonucleotide
  Target: PCSK9; (+) strand; PAM type: YTN; PAM sequence: CTG
gaacctgggagaaggaggta

SEQ ID NO: 28695 - DNA, 20 bp, Artificial Sequence
  Description of Artificial Sequence: Synthetic oligonucleotide
  Target: PCSK9; (+) strand; PAM type: YTN; PAM sequence: CTG
ggagaaggaggtagcagtga

SEQ ID NO: 28696 - DNA, 20 bp, Artificial Sequence
  Description of Artificial Sequence: Synthetic oligonucleotide
  Target: PCSK9; (+) strand; PAM type: YTN; PAM sequence: TTG
caccactgcactccagcctg

SEQ ID NO: 28697-28726 - skipped (30 entries)

SEQ ID NO: 28727 - DNA, 23 bp, Artificial Sequence
  Description of Artificial Sequence: Synthetic oligonucleotide
  modified_base (1)..(21): a, c, t, g, unknown or other
nnnnnnnnnnnnnnnnnnnnnrg

SEQ ID NO: 28728 - DNA, 100 bp, Artificial Sequence
  Description of Artificial Sequence: Synthetic oligonucleotide
  modified_base (1)..(20): a, c, t, g, unknown or other
nnnnnnnnnnnnnnnnnnnnguuuuagagcuagaaauagcaaguuaaaauaaggcuaguccguuaucaacuugaaaaaguggcaccgagucggugcuuuu

SEQ ID NO: 28729 - DNA, 96 bp, Artificial Sequence
  Description of Artificial Sequence: Synthetic oligonucleotide
  modified_base (1)..(20): a, c, t, g, unknown or other
nnnnnnnnnnnnnnnnnnnnguuuuagagcuagaaauagcaaguuaaaauaaggcuaguccguuaucaacuugaaaaaguggcaccgagucggugc

SEQ ID NO: 28730 - DNA, 78 bp, Artificial Sequence
  Description of Artificial Sequence: Synthetic oligonucleotide
  modified_base (1)..(1): a, c, t, g, unknown or other
nguuuuagagcuagaaauagcaaguuaaaauaaggcuaguccguuaucaacuugaaaaaguggcaccgagucggugcu

SEQ ID NO: 28731 - RNA, 4 nt, Artificial Sequence
  Artificial Polynucleotide
  misc_feature (4)..(4): nucleotide may form a wobble pair with a nucleotide on the opposite strand
rrrn

SEQ ID NO: 28732 - DNA, 20 bp, Artificial Sequence
  Description of Artificial Sequence: Synthetic oligonucleotide
tgggactccccagagccagg
